(19) United States
(12) Patent Application Publication
(10) Pub. No.: US 2024/0141412 A1
(43) Pub. Date: May 2, 2024

(54) COMPOSITIONS AND METHODS OF A NUCLEASE CHAIN REACTION FOR NUCLEIC ACID DETECTION

(71) Applicant: THE REGENTS OF THE UNIVERSITY OF CALIFORNIA, Oakland, CA (US)

(72) Inventors: David Savage, Berkeley, CA (US); Patrick Hsu, Berkeley, CA (US); Noam Prywes, Berkeley, CA (US); Emeric J. Charles, Berkeley, CA (US); Gavin J. Knott, Berkeley, CA (US); John James Desmarais, Berkeley, CA (US); Shineui Kim, Berkeley, CA (US); Eli Dugan, Berkeley, CA (US); Maria Lukarska, Berkeley, CA (US); Sita S. Chandrasekaran, Berkeley, CA (US); Nicholas C. Lammers, Berkeley, CA (US); Tina Y. Liu, Berkeley, CA (US); Amanda Mok, Berkeley, CA (US); Liana Lareau, Berkeley, CA (US); Brittney Wai-Ling Thornton, Berkeley, CA (US)

(21) Appl. No.: 17/926,441

(22) PCT Filed: May 18, 2021
(86) PCT No.: PCT/US2021/032977

§ 371 Date: Nov. 18, 2022

Related U.S. Application Data
(60) Provisional application No. 63/027,175, filed on May 19, 2020.

(51) Int. Cl. C12Q 1/6818; C12Q 1/6876

(52) U.S. Cl. CPC C12Q 1/6818; C12Q 1/6876

(57) ABSTRACT

Described herein are nucleic acid detection compositions and systems comprising an internal nuclease chain reaction (NCR) for signal amplification and methods of using these NCR-containing compositions and systems.

### CROSS-REFERENCE TO RELATED APPLICATIONS

[0001] This application is a U.S. National Phase application under 35 U.S.C. § 371 of International Patent Application No. PCT/US2021/032977, filed on May 18, 2021, which claims the benefit of U.S. Patent Application Ser. No. 63/027,175, filed on May 19, 2020. The disclosure of the prior applications are considered part of (and are incorporated by reference in) the disclosure of this application.

### GOVERNMENT SUPPORT

[0002] This invention was made with government support under Grant Number OD021369 awarded by the National Institutes of Health. The government has certain rights in the invention.

### SEQUENCE LISTING

[0003] This document contains a sequence listing that has been submitted electronically as an ASCII text file named 51229-0004WO_SubSL.txt. The ASCII text file, created on Apr. 25, 2023, is 1065000 bytes in size. The material in the ASCII text file is hereby incorporated by reference in its entirety.

### TECHNICAL FIELD

[0004] The present invention concerns methods and compositions for the detection of a nucleic acid, including detection systems comprising an internal nuclease chair reaction (NCR) for rapid and sensitive detection of any target nucleic acid sequence.

### BACKGROUND

[0005] Clustered regularly interspaced short palindromic repeats (CRISPR) were discovered in the late 1980s. While the notion that these sequences are involved in bacterial defense systems was suggested over the subsequent decades, it was not until the mid to late 2000s that it became more widely accepted. During that time several papers elucidated the basics of this acquired immunity system: foreign DNA sequences (e.g. from plasmids and viruses) flanked by palindromic repeats are incorporated in into the host genome, and their RNA products direct Cas complexes to cut nucleic acids containing complementary sequences.

[0006] Simplified complexes of CRISPR-associated (Cas) proteins in combination with engineered guide RNAs were later shown to be able to locate and cleave specific DNA sequences. This led to an explosion of novel technologies, especially genome editing. Further research has shown that these proteins may be used to edit genomes in vivo. CRISPR systems are found in archaea and a number of bacteria. In addition to their more widely recognized ability to target DNA, some types of Cas proteins also have activity that targets RNA. For example, the Cas13 family of enzymes, such as Cas13a, Cas13b, Cas13c, and Cas13d, have two RNA endonuclease (RNase) domains.

[0007] The non-specific ribonuclease (RNase) or deoxyribonuclease (DNase) activity of some CRISPR-associated proteins may be dormant until being activated by the binding of other factors to the protein or protein complex. As such, Cas13 or Cas12 enzymes can be programmed with a guide RNA that recognizes a desired target sequence, activating a non-specific RNase or DNase activity. This can be used to release a detectable label, such as a quenched fluorescent reporter, leading to a detectable signal such as fluorescence. For example, the SHERLOCK (Specific High-sensitivity Enzymatic Report UnLOCKing) uses Cas13 proteins for detection of RNA targets and the DETECTR system uses Cas12 proteins for DNA targets to cleave quenched reporter molecules only in the presence of a specified RNA or DNA target sequence. See, e.g., Li et al. (2019) Trends in Biotech. 37(7):730-743; Petri & Pattanayak (2018) The CRISPR Journal 1(3):209-211; Gootenberg et al. (2017) Science 356(6336):438-442; and U.S. Publication Nos. 20180274017 and 20190241954.

[0008] However, current Cas-based detection systems may have limitations in sensitivity, and in addition, rapid testing results are desired in times of wide spread exposure to viral and other pathogens. Testing capable of producing sensitive, specific, and rapid results without the need for specialized equipment such that tests may be performed on a field basis, in a ‘point-of care’ or POC setting, or in a consumer ‘at-home’ use are also highly desirable.

[0009] Thus, there remains a need for methods and compositions that allow for the direct, sensitive, rapid, and easy-to-use detection of nucleic acids, including for the detection of pathogens in a sample.

### SUMMARY

[0010] Disclosed herein are compositions and methods for detecting RNA or DNA. The systems described herein provide a highly sensitive, quantitative, and rapid assay in an all-in-one detection modality that possesses an internal Nuclease Chain Reaction (NCR) which provides an amplifying, feed-forward loop to generate an exponential signal upon detection of a target nucleic acid.

[0011] Described herein are systems for detecting a nucleic acid. The systems typically comprise at least two components: (1) a first component that detects the nucleic acid and in addition, is itself capable of generating, or alternatively via one or more other molecules (e.g., a reporter), generates a signal upon detection of the target nucleic acid in any sample; and (2) a second component that amplifies the signal generated upon detection by the first component. The system may include a “feed forward” system in which the first component (e.g., primary activator complex), when activated, is able to act on a component of an inactive second recognizing complex to activate the second recognizing complex to become an activated signal amplifier, such that the signal (e.g., release of a detectable label) is further amplified. Each of the components may comprise one or more molecules (e.g., one or more fusion proteins, one or more enzymes, one or more nucleic acids, one or more fusions of nucleic acids and nucleic acids, etc.). The systems described herein comprising a component that amplifies the detection signal and may increase the detection of the nucleic acid any amount as compared to systems not including an amplifier component, including but not limited to 1 to 10-fold, 1 to 50-fold, 1 to 100-fold, 1 to 500-fold, 1 to 1000-fold (or any value therebetween) or more.

[0012] In certain aspects, described herein is a nucleic acid detection system comprising: a reporter molecule comprising a detectable label, wherein the detectable label is released for detection upon cleavage of the reporter molecule; a primary activator complex comprising a first recognizing complex (“target sensor”), wherein the first recognizing complex recognizes one or more target sequences in a sample (the “primary activator”), wherein upon recognition of the target sequence the primary activator complex is activated and is able to act on the reporter molecule and release the detectable label; and a secondary amplifier complex comprising a second inactive recognizing complex, wherein following the activity of the activated primary activator complex on a component of the second recognizing complex, the second recognizing complex is activated and recognizes one or more amplifier sequences (“activators”), and acts on the reporter molecule and releases the detectable label and acts on other inactive second recognizing complexes such that they become activated. Thus, the invention relates to a nucleic acid detection system comprising: (i) a reporter molecule comprising a detectable label, wherein the detectable label is released for detection upon cleavage of the reporter molecule; (ii) a primary activator complex comprising a first recognizing complex, and; (iii) an inactive secondary complex wherein; (a) the first recognizing complex recognizes one or more primary activators in a sample, wherein; (b) upon recognition of the primary activator, the primary activator complex is activated and is able to act on the reporter molecule to release the detectable label, and; (c) the activated primary activator complex is able to act on a component of an inactive second recognizing complex to activate the second recognizing complex to become an activated signal amplifier, wherein; (d) said activated signal amplifier is able to act on the reporter molecule to release the detectable label, and; (e) said activated signal amplifier is able to act on a component of an inactive second recognizing complex to activate the second recognizing complex to become an activated signal amplifier such that a feed-forward loop is initiated.

[0013] In other aspects, described herein is a nucleic acid detection system comprising: a reporter molecule comprising a detectable label, wherein the detectable label is released for detection upon cleavage of the reporter molecule; a primary activator complex comprising a first Cas-effector enzyme (“target sensor”) programmed with a first guide RNA, wherein the first guide RNA recognizes one or more target sequences in a sample (“primary activator”), wherein upon hybridization of the first guide RNA to the target sequence, the primary activator complex is activated, displaying a non-specific nuclease activity that cleaves the reporter molecule and releases the detectable label; and a signal amplifier complex comprising a second Cas-effector enzyme and a second guide RNA, wherein the second guide RNA recognizes one or more amplifier sequences (“activators”), wherein upon hybridization of the second guide RNA to the amplifier sequence the signal amplifier is activated, displaying a non-specific nuclease activity that cleaves the reporter molecule and releases the detectable label and is able to act on additional second Cas-effector enzymes to activate them to become signal amplifiers. Thus, the invention relates to a nucleic acid detection system comprising: a reporter molecule comprising a detectable label, wherein the detectable label is released for detection upon cleavage of the reporter molecule; a primary activator complex comprising a first Cas-effector enzyme programmed with a first guide RNA, wherein the first guide RNA recognizes one or more primary activators in a sample, wherein upon hybridization of the first guide RNA to the primary activator, the primary activator complex is activated and is a non-specific nuclease that cleaves the reporter molecule and releases the detectable label; and a signal amplifier comprising a second Cas-effector enzyme and a second guide RNA, wherein activation of the primary activation complex results in the activation of one or more activator sequences that are recognized by the second guide RNA, wherein upon hybridization of the second guide RNA to the activator sequence the signal amplifier complex is activated and is a non-specific nuclease that cleaves the reporter molecule and releases the detectable label.

[0014] The nucleic acid detection systems described herein preferably involve a “feed forward” loop in which detection of the primary activator triggers activation of the primary activation complex, which in turn causes activation of the secondary activator complex to amplify the detectable signal in the presence of the target (initially detected by the target sensor/primary activator), for example systems in which the activated primary activator complex activates the activator molecule and/or the secondary guide RNA (e.g. through release of a cage structure on the activator molecule and/or secondary guide RNA), such that the second guide RNA of the secondary amplifier complex hybridizes with the released activator molecule such that further quenched reporter molecules are cleaved and further detectable label is released.

[0015] In any of the nucleic acid detection systems described herein the first and/or second Cas-effector enzymes can comprise an RNase and/or a DNase, for example one or more Cas13 proteins, one or more Cas12 proteins, one or more Cas14 proteins, one or more Csm6 proteins, and/or one or more Csx1 proteins in any combination(s), optionally one or more proteins listed as shown in any of the appended Tables, Figures or Examples (SEQ ID NO:s 115-268). In certain embodiments, the first and/or second Cas-effector enzymes comprise one or more of the same or different Cas13d proteins. The one or more Cas-effector enzymes can be the same or different proteins. Furthermore, the first and/or second guide RNAs of the systems described herein can comprise one or more constant regions, including but not limited to one or more of the same or different RNAs as shown in any of the appended Tables (e.g., Table 4), Figures or Examples (SEQ ID NOs:42-85).

[0016] In any of the nucleic acid detection systems described herein, the reporter may comprise a quencher operably linked to the detectable label, optionally wherein the detectable label comprises one or more fluorescent molecule (e.g., fluorescent dyes). The reporter molecule may comprise an oligonucleotide linking the quencher and the fluorophore, wherein the oligonucleotide optionally comprises a caged structure, optionally having a stem-loop structure. The reporter molecule may comprise a sequence as shown in Table 8. In certain embodiments, the reporter molecule is complexed with a trans cage molecule.

[0017] In any of the nucleic acid detection systems described herein, one or more of the components (e.g., activator, one or more guide molecules, amplifier sequences, and/or reporters) may be caged (e.g., by caging structures or molecules). In certain embodiments, the cage comprises or creates a molecule (e.g., oligonucleotide sequence) having a stem-loop structure. Oligonucleotide sequences included with the activator may comprise DNA and/or RNA bases and, in addition, one or more of the DNA and/or RNA bases may be modified nucleotide bases, optionally comprising one or more locked nucleic acid (LNA) or moieties and/or 2′-OMe RNA. One or more caging structures may be used, for example wherein one or more of the amplifier sequences comprising caging structures on their 3′ and/or 5′ ends. One or more trans caging molecules may be also be used in any of the nucleic acid systems described herein.

[0018] In any of the nucleic acid detection systems described herein, the interaction as between one or more of the components may be limited to a certain amount of time (e.g., seconds, minutes or more), for example wherein one or both of the first and second guide RNAs and/or one or more of the amplifier sequences are modified to allow conditional interaction with the Cas-effector enzyme during an optimal time frame. In certain embodiments, one or both of the first and second guide RNAs and/or one or more of the amplifier sequences are modified to allow conditional interaction with the Cas-effector enzyme during an optimal time frame. In any of nucleic acid detection systems described herein, the one or more amplifier sequences comprise poly U and/or poly A sequences, optionally A₄-Uₙ, A₅-Uₙ and/or A₆-Uₙ sequences.

[0019] The target sequence and/or amplifier sequence of any of the systems described herein may be 100% complementary to first and/or second guide RNAs, or, alternatively, may not be 100% complementary to first and/or second guide RNAs. The target sequence in any of the systems described herein may be DNA and/or RNA from one or more mammals, viruses, bacteria, and/or fungi. In certain embodiments, the target sequence is in an RNA virus, for example a coronavirus, optionally a SARS-Cov-2 coronavirus.

[0020] In any of the nucleic acid detection systems described herein, the sample may be a biological or environmental sample. The biological sample may comprise blood, saliva, urine, biopsy, plasma, serum, bronchoalveolar lavage, sputum, a fecal sample, cerebrospinal fluid, a fine needle aspirate, a swab sample (e.g., a buccal swab, a cervical swab, a nasal swab), interstitial fluid, synovial fluid, nasal discharge, tears, buffy coat, a mucous membrane sample, and/or an epithelial cell sample (e.g., epithelial cell scraping), etc.) collected from the individual. The sample may be a liquid sample and may be cell-free or a liquid comprising cells.

[0021] Also described are methods of detecting a nucleic acid (e.g., target sequence), the methods comprising: (a) contacting a sample suspected of including the nucleic acid (e.g., target sequence) with: (i) a nucleic acid detection system as described herein, and (b) measuring a detectable signal from the detectable label, thereby detecting the target sequence. In certain embodiments, the methods further comprise quantifying the levels of the detectable label. contacting step may be carried out in the presence of divalent metal ions, in an acellular environment or within a cell in vitro or in vivo. The contacting step may be carried out any length of time, including seconds, minutes or hours or more (or any time therebetween), optionally seconds to 2 hours (or any time therebetween).

[0022] Accordingly, the methods and compositions of the invention comprise at least the following numbered embodiments.

### EMBODIMENTS

[0023] 1. A system for detecting a nucleic acid comprising a first component comprising a first composition for detecting the nucleic acid that generates a signal upon detection of the nucleic acid and a second component comprising a second composition that amplifies the signal generated by the first component.

[0024] 2. The system of embodiment 1 wherein the first and second components comprise any of the compositions described herein, including as in embodiments 4-41.

[0025] 3. A method of detecting a nucleic acid, the method comprising using one or more systems as described in embodiments 4 to 41.

[0026] 4. A nucleic acid detection system comprising:
[0027] i) a reporter molecule comprising a detectable label, wherein the detectable label is released for detection upon cleavage of the reporter molecule;
[0028] ii) a primary activator complex comprising a first recognizing complex, and;
[0029] iii) an inactive secondary complex wherein;
   [0030] a) the first recognizing complex recognizes one or more primary activators in a sample, wherein;
   [0031] b) upon recognition of the primary activator, the primary activator complex is activated and is able to act on the reporter molecule to release the detectable label, and;
   [0032] c) the activated primary activator complex is able to act on a component of an inactive second recognizing complex to activate the second recognizing complex to become an activated signal amplifier, wherein;
   [0033] d) said activated signal amplifier is able to act on the reporter molecule to release the detectable label, and;
   [0034] e) said activated signal amplifier is able to act on a component of an inactive second recognizing complex to activate the second recognizing complex to become an activated signal amplifier such that a feed-forward loop is initiated.

[0035] 5. A nucleic acid detection system comprising:
[0036] a reporter molecule comprising a detectable label, wherein the detectable label is released for detection upon cleavage of the reporter molecule;
[0037] a primary activator complex comprising a first Cas-effector enzyme programmed with a first guide RNA, wherein the first guide RNA recognizes one or more primary activators in a sample, wherein upon hybridization of the first guide RNA to the primary activator, the primary activator complex is activated and is a non-specific nuclease that cleaves the reporter molecule and releases the detectable label; and
[0038] a signal amplifier comprising a second Cas-effector enzyme and a second guide RNA, wherein activation of the primary activation complex results in the activation of one or more activator sequences that are recognized by the second guide RNA, wherein upon hybridization of the second guide RNA to the activator sequence the signal amplifier complex is activated and is a non-specific nuclease that cleaves the reporter molecule and releases the detectable label.

[0039] 6. The nucleic acid detection system of any of the preceding embodiments, wherein the first and/or second Cas-effector enzymes comprise an RNase or a DNase.

[0040] 7. The nucleic acid detection system of any of the preceding embodiments, wherein the first and/or second Cas-effector enzymes comprises one or more Cas13 proteins, one or more Cas12 proteins, one or more Cas14 proteins, one or more Csm6 proteins, and/or one or more Csx1 proteins, optionally one or more proteins listed as shown in any of the appended Tables, Examples or Figures (e.g., SEQ ID NOs: 115-268).

[0041] 8. The nucleic acid detection system of any of the preceding embodiments, wherein the first and/or second Cas-effectors comprise one or more Cas13 proteins, optionally one or more Cas13 proteins as shown in any of the appended Tables, Examples or Figures (e.g., SEQ ID NOs: 115-135).

[0042] 9. The nucleic acid detection system of any of the proceeding embodiments, wherein the first and/or second Cas-effectors comprise one or more Cas13d proteins.

[0043] 10. The nucleic acid detection system of any of the preceding embodiments, wherein the first and/or second Cas-effectors comprise one or more Cas12 proteins, one or more Cas13 proteins, one or more Cas14 proteins, and/or one or more Csm6 proteins in any combination.

[0044] 11. The nucleic acid detection system of any of the preceding embodiments, wherein the first and second Cas-effector enzymes comprise one or more of the same or different proteins.

[0045] 12. The nucleic acid detection system of any of the preceding embodiments, wherein the first and/or second guide RNAs comprise one or more constant regions.

[0046] 13. The nucleic acid detection system of any of the preceding embodiments, wherein the first and/or second guide RNAs comprise the same and/or different RNAs of any of the appended Tables, Figures or Examples, optionally wherein the first and/or second guide RNAs are selected from SEQ ID NOs: 42-85, as shown in Table 4.

[0047] 14. The nucleic acid detection system of any of the preceding embodiments, wherein the reporter molecule comprises a quencher operably linked to the detectable label, optionally wherein the detectable label comprises one or more fluorescent molecule.

[0048] 15. The nucleic acid detection system of any of the preceding embodiments, wherein the reporter molecule comprises an oligonucleotide linking the quencher and the fluorophore, wherein the oligonucleotide optionally comprises a caged structure, optionally having or creating a stem-loop structure.

[0049] 16. The nucleic acid detection system of any of the preceding embodiments, wherein the reporter molecule comprises a sequence as shown in Table 8.

[0050] 17. The nucleic acid system of any of the preceding embodiments, wherein the reporter molecule is complexed with a trans cage molecule.

[0051] 18. The nucleic acid detection system of any of the preceding embodiments, wherein the reporter molecule the detectable label comprises one or more fluorescent dyes.

[0052] 19. The nucleic acid detection system of any of the preceding embodiments, wherein the activator molecule is caged, optionally comprising or creating a molecule (e.g., oligonucleotide) having a stem-loop structure.

[0053] 20. The nucleic acid detection system of any of the preceding embodiments, wherein the activator molecule further comprises an oligonucleotide sequence wherein the oligonucleotide sequence comprises modified nucleotide bases.

[0054] 21. The nucleic acid detection system of any of the preceding embodiments, wherein the activator molecule further comprises an oligonucleotide sequence wherein the oligonucleotide sequence comprises both RNA and DNA bases.

[0055] 22. The nucleic acid detection system of an of the preceding embodiments, wherein the guide molecule is caged for example a caging structure or caging molecule, optionally comprising or creating a stem-loop structure.

[0056] 23. The nucleic acid detection system of any of the preceding embodiments, wherein one or more of the amplifier sequences and/or one or both of the guide sequences are caged, optionally wherein the cage comprises or creates one or more structure such as a loop structure and/or a modification to one or more of the amplifier sequences comprising one or more locked nucleic acid (LNA) or moieties and/or 2′-OMe RNA.

[0057] 24. The nucleic acid detection system of any of the preceding embodiments wherein one or more of the amplifier sequences comprising caging structures on their 3′ and/or 5′ ends.

[0058] 25. The nucleic acid detection system of any of the preceding embodiments further comprising trans caging molecules.

[0059] 26. The nucleic acid detection system of any of the preceding embodiments, wherein the interaction as between one or more of the components is limited to a certain amount of time (e.g., seconds, minutes or more), for example wherein one or both of the first and second guide RNAs and/or one or more of the amplifier sequences are modified to allow conditional interaction with the Cas-effector enzyme during an optimal time frame.

[0060] 27. The nucleic acid detection system of any of the preceding embodiments, wherein the one or more amplifier sequences comprise poly U and/or poly A sequences, optionally A₄-Uₙ, A₅-Uₙ and A₆-Uₙ sequences.

[0061] 28. The nucleic acid detection system of any of the preceding embodiments, wherein the target sequence and/or amplifier sequence is(are) 100% complementary to first and/or second guide RNAs.

[0062] 29. The nucleic acid detection system of any of the preceding embodiments, wherein the target sequence and/or amplifier sequence is(are) not 100% complementary to first and/or second guide RNAs.

[0063] 30. The nucleic acid detection system of any of the preceding embodiments, wherein the target sequence is DNA or RNA from one or more mammals, viruses, bacteria, or fungi.

[0064] 31. The nucleic acid detection system of any of the preceding embodiments, wherein the target sequence is in an RNA virus.

[0065] 32. The nucleic acid detection system of any of the preceding embodiments, wherein the target sequence is in a coronavirus, optionally a SARS-Cov-2 coronavirus.

[0066] 33. The nucleic acid detection system of any of the preceding embodiments, wherein the sample is a biological or environmental sample.

[0067] 34. The nucleic acid detection system of any of the preceding embodiments, wherein the biological sample comprises blood, saliva, urine, biopsy, plasma, serum, bronchoalveolar lavage, sputum, a fecal sample, cerebrospinal fluid, a fine needle aspirate, a swab sample (e.g., a buccal swab, a cervical swab, a nasal swab), interstitial fluid, synovial fluid, nasal discharge, tears, buffy coat, a mucous membrane sample, an epithelial cell sample (e.g., epithelial cell scraping), etc.) collected from the individual.

[0068] 35. The nucleic acid detection system of any of the preceding embodiments, wherein the sample comprises a cell-free liquid sample.

[0069] 36. The nucleic acid detection system of any of the preceding embodiments wherein the sample comprises a cell-free liquid environmental sample.

[0070] 37. The nucleic acid detection system of any of the preceding embodiments, wherein the sample comprises a liquid comprising cells.

[0071] 38. A method of detecting a target sequence in a sample, the method comprising
[0072] (a) contacting a sample suspected of including the target sequence with:
   [0073] (i) a nucleic acid detection system of any of the preceding claims, and
[0074] (b) measuring a detectable signal from the detectable label, thereby detecting the target sequence.

[0075] 39. The method of embodiment 38, further comprising quantifying the levels of the detectable label.

[0076] 40. The method of any of the preceding embodiments, wherein the contacting step is carried out in the presence of divalent metal ions, in an acellular environment or within a cell in vitro or in vivo.

[0077] 41. The method of any of the preceding embodiments, wherein the contacting step is seconds to 2 hours.

[0078] These and other aspects will be readily apparent to the skilled artisan in light of disclosure as a whole.

### BRIEF DESCRIPTION OF THE DRAWINGS

[0079] FIGS. 1A through 1J are schematics depicting exemplary NCR systems as described herein. It will be understood that the methods and compositions of the invention include all ‘mix and match’ variations including any combination of the components of these exemplary NCR systems. FIG. 1A shows the Primary Activator complex (1) comprises a Cas-effector enzyme programmed with a guide RNA that recognizes a desired target nucleic sequence (the Cas-effector enzyme and guide is the “target sensor”, it recognizes the “target” nucleic acid, also known as the “primary activator”) (2) in the sample (e.g., viral DNA or RNA). Upon hybridization of the target sequence to the guide RNA of the target sensor (also known as “crRNA”), the target sensor is activated as a Cas nuclease and displays non-specific RNase (e.g., Cas13 effector protein) or DNase (e.g., Cas12 effector protein) activity (the “activated sensor”). The activated sensor cleaves a reporter molecule (3) to release a detectable label (e.g., releasing a fluorescent reporter from a quencher), leading to a detectable signal (such as fluorescence). In this primary signaling pathway, signal is generated as a direct response from the sensor detecting the target nucleic acid, which then activates the sensor (the activated sensor). The activated sensor is then able to engage in non-specific cleavage activity of single stranded nucleic acids (“trans cleavage”). As shown in FIG. 1B, the NCR systems as described herein include an additional signal amplification pathway comprising a Signal Amplifier (4) that, in some embodiments, comprises a second Cas-effector protein programmed with an Activator guide RNA that recognizes an amplifier RNA (5) that hybridizes to the guide RNA of the signal amplifier so as to activate the signal amplifier into a non-specific nuclease capable of cleaving the reporter molecule (3) and amplifying the signal (6) detected from the reporter. As shown, the amplifier RNA (5) may be caged such that it will not interact with the amplifier complex. Cleavage of the single stranded loops in the cage complexes by trans cleavage activity of an activated sensor or amplifier complex releases the cage and allows the amplifier RNA to interact with the amplifier complex. In some embodiments, the guide or crRNAs may also comprise cage complexes. In some embodiments, short trans cage molecules are added to interact with an activator or crRNA and serve as a cage. In some embodiments, cages are released by other mechanisms such as through the use of aptamers, ribozymes and the like. FIG. 1C depicts the use of Cas13 in the primary activator complex with Cas12 in the signal amplification pathway. FIG. 1D shows the use of Cas12 in the primary activator complex with Cas12 in the signal amplification pathway. In this scenario, RT-LAMP (Reverse Transcription Loop-Mediated isothermal amplification, (Fu et al (2011) Appl. Biochem. Biotechnol. 163 (7): 845-50) is used to amplify the target RNA. Other amplification techniques including for example mismatch tolerant LAMP, LAMP-T7, strand displacement amplification (SDA), helicase-dependent amplification (HDA, Recombinase Polymerase Amplification (RPA), Nucleic Acid Sequences Based Amplification (NASBA), transcription mediated amplification (TMA) and the like may be used (see below). FIG. 1E shows the use of Cas13 in the primary activator complex with Cas13 in the signal amplification pathway and FIG. 1F shows Cas12 in the primary activator complex with Cas13 in the signal amplification pathway. In some embodiments, RT-LAMP-T7 amplification is used to amplify the primary amplifier to increase the number of target molecules for sensing by a Cas13 target sensor complex. This case is illustrated in the context of a Cas13 sensor complex and Cas13 amplification complex (FIG. 1E) or in a system with a Cas13 sensor complex and a Cas12 sensor complex (FIG. 1F). FIG. 1G shows the use of exemplary caged guide RNAs where the cages are present on the 5′ (top) or 3′ (bottom) end of the guide RNA. FIG. 1H depicts two strategies for the use of caged amplifiers and caged guides wherein the amplifiers may comprise both RNA and DNA nucleotides. In some embodiments, oligonucleotide sequences may be used that are not covalently linked to the amplifier or guide RNA which are able to interact with the amplifier or guide and act as a cage (trans cage molecules). FIG. 1I and FIG. 1J show pathways to use Csm6 to amplify the signal. In these figures, the term “NCR” refers to a synthetic nucleic acid, with the numeric code following NCR identifying the particular nucleic acid (e.g., as shown in any of the appended Tables, Examples or Figures). “RNP” refers to a ribonucleotide protein complex, typically a Cas protein and a crRNA or guide RNA.

[0080] FIG. 2 depicts a graph showing signal detected in the presence of the primary activator RNA (“with primary” shown as the right bars under each condition) and absence of primary (“no primary” shown as the left bars under each condition) for several activator RNAs. “No secondary” shows the signal in the absence of primary or secondary systems. Indicated are two sequences (NCR_061 and NCR_064) that display differential signal in the presence or absence of primary activator RNA.

[0081] FIGS. 3A through 3D depict four graphs showing signal over time for four activator RNAs, NCR 045 (FIG. 3A), NCR_042 (FIG. 3B), NCR 061 (FIG. 3C) and NCR_067 (FIG. 3D). For NCR_045 and NCR_042, “Cage alone” is the signal observed in the presence of the amplifying RNA only; “Primary” indicates the signal observed without any secondary amplification; and “Cage+Primary” indicates the signal observed when all components are present. For NCR_061 and NCR_067, the data curves are as indicated in the graph. “RNP2” means the secondary amplifier complex.

[0082] FIGS. 4A through 4D are graphs depicting signal observed in a series of optimization reactions. FIG. 4A shows the signal observed as the concentration of primary activator RNA is varied from 200 pM to 20 fM. The signal at 20 pM displays the greatest differential between signal in the absence of the NCR as compared to in the presence of the amplification for NCR_061 in these conditions. FIG. 4B depicts the generation of signal over time, demonstrating that at 200 pM the NCR signal develops the fastest. FIG. 4C depicts the signal with an optimized guide RNA. FIG. 4D shows these results over time and demonstrates that for this guide, the concentration of 20 pM primary activator RNA develops the fastest.

[0083] FIGS. 5A through 5E show results from experiments testing modifications of the activator RNA. FIG. 5A shows the signal obtained when the activator comprised an anti-TAG sequence and FIG. 5B shows the signal when the anti-TAG is absent. “Normal” indicates the data observed when an activator RNA lacking an anti-TAG sequence is used. A differential signal is observed when the anti-TAG sequence is included. FIGS. 5C through 5E demonstrate the effects on signal amplification from variations in the activator RNA. FIG. 5C depicts the signal generation over time without any cage on the activator RNA. FIG. 5D and FIG. 5E show the effects on signal generation when the activator has more uridines in the cage structure.

[0084] FIGS. 6A through 6C depict sequences and data related to the use of caged guide RNAs. FIG. 6A depicts a guide RNA (NCR 018, SEQ ID NO: 21). FIG. 6B depicts the data observed when either the caged NCR_018 or its cognate uncaged equivalent (NCR 009) are used. Two concentrations, 10 μM and 10 nM, of NCR_009 were used. FIG. 6C depicts the results observed when the background signal is subtracted from the signal in the presence of primary activator and secondary activation.

[0085] FIG. 7 depicts a graph showing data obtained with alternate caged guide RNAs. The data depicted is the signal observed when the data obtained in the presence of primary and secondary (cage) has the signal observed from primary signal only and the signal observed from secondary (cage) signal only are subtracted from it.

[0086] FIG. 8 is a graph showing the signal kinetics observed when caged guide RNAs are used comprising differing single stranded loop structures. The stem-loop sections of the guides are characterized by their melting temperatures which are indicated. Faster signal kinetics are observed using guides comprising stem loops with lower melting temperatures.

[0087] FIGS. 9A through 9F show the results of experiments using trans cage molecules. FIG. 9A depicts a guide RNA (NCR 004) which lacks its own cage structure, but is shown on the top complexed with a trans cage molecule NCR_271. Lower down is shown NCR_004 aligned with a series of trans cage molecules including NCR_268. NCR_269, NCR_270. NCR_271 and NCR_272 from top to bottom. FIG. 9A discloses SEQ ID NOS 272-273, 272, 274-276, 273, and 277, respectively, in order of appearance. FIG. 9B (NCR 269), FIG. 9C (NCR 268), FIG. 9D (NC %_270), FIG. 9E (NCR_271) and FIG. 9F (NCR 272) depict the signal generated using the different trans cage molecules at varying ratios of trans cage to guide RNA.

### DETAILED DESCRIPTION

[0088] Current CRISPR-based nucleic acid detection methods involving Cas proteins exploit the fact that Cas13 or Cas12 enzymes can be programmed with a guide RNA that recognizes a desired target sequence, activating a non-specific RNase or DNase activity. The non-specific nuclease is used to release a detectable label, such as a quenched fluorescent reporter, leading to a detectable signal such as fluorescence. However, current methods can be limited in sensitivity. Current methods may also require specific equipment (e.g. a PCR machine), specialized conditions (e.g. temperatures), repetitive manual techniques such as multiple pipetting steps or other complicated steps that result in long reporting times.

[0089] Thus, described herein are nucleic acid detection compositions, systems and methods that overcome the limitations of the current methodology by providing an all-in-one detection modality comprising an internal Nuclease Chain Reaction (NCR) which imparts an amplifying, feed-forward loop to generate an exponential signal upon detection of a target nucleic acid and provide efficient detection of the target sequence. The NCR compositions, systems and methods described herein provide sensitive and rapid detection of any target DNA or RNA, including for detection of transcriptional states, cancers, or pathogens such as bacteria or viruses, including coronaviruses such as SARS-CoV-2 (associated with COVID-19 disease).

### General

[0090] Practice of the methods, as well as preparation and use of the compositions disclosed herein employ, unless otherwise indicated, conventional techniques in molecular biology, biochemistry, chromatin structure and analysis, computational chemistry, cell culture, recombinant DNA and related fields as are within the skill of the art.

### Definitions

[0091] “Oligonucleotide,” “polynucleotide,” and “nucleic acid,” are used interchangeably herein. These terms may refer to a polymeric form of nucleic acids of any length, strandedness (double or single), and either ribonucleotides (RNA) or deoxyribonucleotides (DNA), and hybrid molecules (comprising DNA and RNA). The disclosed nucleic acids may also include naturally occurring and synthetic or non-natural nucleobases. Natural nucleobases include adenine (A), thymine (T), cytosine (C), guanine (G), and uracil (U).

[0092] “Complementarity” refers to a first nucleic acid having a first sequence that allows it to “base pair,” “bind,” “anneal”, or “hybridize,” to a second nucleic acid. Binding may be affected by the amount of complementarity and certain external conditions such as ionic strength of the environment, temperature, etc. Base-pairing rules are well known in the art (A pairs with T in DNA, and with U in RNA; and G pairs with C). In some cases, RNA may include pairings where G may pair with U. Complementarity does not, in all cases, indicate complete or 100% complementarity. For example, complementarity may be less than 100% and more than about 60%.

[0093] “Protein,” “peptide,” “polypeptide” are used interchangeably. The terms refer to a polymeric form of amino acids of any length, which may include natural and non-natural residues. The residues may also be modified prior to, or after incorporation into the polypeptide. In some embodiments, the polypeptides may be branched as well as linear.

[0094] “Programmed,” in reference to a Cas protein, refers to a Cas protein that includes a guide RNA that contains a sequence complementary to a target sequence. Typically, a programmed Cas protein includes an engineered guide RNA.

[0095] “Cas protein” is a CRISPR associated protein. The presently disclosed Cas proteins possess a nuclease activity that may be activated upon binding of a target sequence to a guide RNA bound by the Cas protein. As disclosed in more detail below, the guide RNA may, with other sequences, comprise a crRNA, which may, in some embodiments, be processed from a pre-crRNA sequence. In an embodiment, the guide RNA sequence may include natural or synthetic nucleic acids, for example modified nucleic acids such as, without limitation, locked nucleic acids (LNA), 2′-o-methylated bases, or even ssDNA (single stranded DNA). Cas proteins may be from the Cas12 or Cas13 group, which may be derived from various sources known to those of skill in the art.

[0096] The Cas protein may be a “functional derivative” of a naturally occurring Cas protein. A “functional derivative” of a native sequence polypeptide is a compound having a qualitative biological property in common with a native sequence polypeptide. “Functional derivatives” include, but are not limited to, fragments of a native sequence and derivatives of a native sequence polypeptide and its fragments, provided that they have a biological activity in common with a corresponding native sequence polypeptide. A biological activity contemplated herein is the ability of the functional derivative to hydrolyze a DNA substrate into fragments. The term “derivative” encompasses both amino acid sequence variants of polypeptide, covalent modifications, and fusions thereof. Suitable derivatives of a Cas polypeptide or a fragment thereof include but are not limited to mutants, fusions, covalent modifications of Cas protein or a fragment thereof. Cas protein, which includes Cas protein or a fragment thereof, as well as derivatives of Cas protein or a fragment thereof, may be obtainable from a cell or synthesized chemically or by a combination of these two procedures. The cell may be a cell that naturally produces Cas protein, or a cell that naturally produces Cas protein and is genetically engineered to produce the endogenous Cas protein at a higher expression level or to produce a Cas protein from an exogenously introduced nucleic acid, which nucleic acid encodes a Cas that is same or different from the endogenous Cas. In some cases, the cell does not naturally produce Cas protein and is genetically engineered to produce a Cas protein.

[0097] “Coding sequences” are DNA sequences that encode polypeptide sequences or RNA sequences, for example guide RNAs. Coding sequences that encode polypeptides are first transcribed into RNA, which, in-turn, may encode the amino acid sequence of the polypeptide. Some RNA sequences, such as guide RNAs may not encode amino acid sequences.

[0098] “Native,” “naturally-occurring,” “unmodified” or “wild-type” describe, among other things, proteins, amino acids, cells, nucleobases, nucleic acids, polynucleotides, and organisms as found in nature. For example, a nucleic acid sequence that is identical to that found in nature, and that has not been modified by man is a native sequence.

[0099] By “hybridizable” or “complementary” or “substantially complementary” it is meant that a nucleic acid (e.g. RNA, DNA) comprises a sequence of nucleotides that enables it to non-covalently bind, i.e. form Watson-Crick base pairs and/or G/U base pairs, “anneal”, or “hybridize,” to another nucleic acid in a sequence-specific, antiparallel, manner (i.e., a nucleic acid specifically binds to a complementary nucleic acid) under the appropriate in vitro and/or in vivo conditions of temperature and solution ionic strength. Standard Watson-Crick base-pairing includes: adenine/adenosine) (A) pairing with thymidine/thymidine (T), A pairing with uracil/uridine (U), and guanine/guanosine) (G) pairing with cytosine/cytidine (C). In addition, for hybridization between two RNA molecules (e.g., dsRNA), and for hybridization of a DNA molecule with an RNA molecule (e.g., when a DNA target nucleic acid base pairs with a guide RNA, etc.): G can also base pair with U. For example, G/U base-pairing is partially responsible for the degeneracy (i.e., redundancy) of the genetic code in the context of tRNA anti-codon base-pairing with codons in mRNA. Thus, in the context of this disclosure, a G (e.g., of a protein-binding segment (e.g., dsRNA duplex) of a guide RNA molecule; of a target nucleic acid (e.g., target DNA) base pairing with a guide RNA) is considered complementary to both a U and to C. For example, when a G/U base-pair can be made at a given nucleotide position of a protein-binding segment (e.g., dsRNA duplex) of a guide RNA molecule, the position is not considered to be non-complementary, but is instead considered to be complementary.

[0100] Hybridization requires that the two nucleic acids contain complementary sequences, although mismatches between bases are possible. The conditions appropriate for hybridization between two nucleic acids depend on the length of the nucleic acids and the degree of complementarity, variables well known in the art. The greater the degree of complementarity between two nucleotide sequences, the greater the value of the melting temperature (Tm) for hybrids of nucleic acids having those sequences. Typically, the length for a hybridizable nucleic acid is 8 nucleotides or more (e.g., 10 nucleotides or more, 12 nucleotides or more, 15 nucleotides or more, 20 nucleotides or more, 22 nucleotides or more, 25 nucleotides or more, or 30 nucleotides or more).

[0101] It is understood that the sequence of a polynucleotide need not be 100% complementary to that of its target nucleic acid to be specifically hybridizable. Moreover, a polynucleotide may hybridize over one or more segments such that intervening or adjacent segments are not involved in the hybridization event (e.g., a loop structure or hairpin structure, a ‘bulge’, and the like). A polynucleotide can comprise 60% or more, 65% or more, 70% or more, 75% or more, 80% or more, 85% or more, 90% or more, 95% or more, 98% or more, 99% or more, 99.5% or more, or 100% sequence complementarity to a target region within the target nucleic acid sequence to which it will hybridize. For example, an antisense nucleic acid in which 18 of 20 nucleotides of the antisense compound are complementary to a target region, and would therefore specifically hybridize, would represent 90 percent complementarity. The remaining noncomplementary nucleotides may be clustered or interspersed with complementary nucleotides and need not be contiguous to each other or to complementary nucleotides. Percent complementarity between particular stretches of nucleic acid sequences within nucleic acids can be determined using any convenient method. Example methods include BLAST programs (basic local alignment search tools) and PowerBLAST programs (Altschul et al., J. Mol. Biol., 1990, 215, 403-410; Zhang and Madden, Genome Res., 1997, 7, 649-656) or by using the Gap program (Wisconsin Sequence Analysis Package, Version 8 for Unix, Genetics Computer Group, University Research Park, Madison Wis.), e.g., using default settings, which uses the algorithm of Smith and Waterman (Adv. Appl. Math., 1981, 2, 482-489).

[0102] “Binding” as used herein (e.g. with reference to an RNA-binding domain of a polypeptide, binding to a target nucleic acid, and the like) refers to a non-covalent interaction between macromolecules (e.g., between a protein and a nucleic acid; between a guide RNA and a target nucleic acid; and the like). While in a state of non-covalent interaction, the macromolecules are said to be “associated” or “interacting” or “binding” (e.g., when a molecule X is said to interact with a molecule Y, it is meant the molecule X binds to molecule Y in a non-covalent manner). Not all components of a binding interaction need be sequence-specific (e.g., contacts with phosphate residues in a DNA backbone), but some portions of a binding interaction may be sequence-specific. Binding interactions are generally characterized by a dissociation constant (Kd) of less than 10⁻⁶ M, less than 10⁻⁷ M, less than 10⁻⁸ M, less than 10⁻⁹ M, less than 10⁻¹⁰ M, less than 10⁻¹¹ M, less than 10⁻¹² M, less than 10⁻¹³ M, less than 10⁻¹⁴ M, or less than 10⁻¹⁵ M. “Affinity” refers to the strength of binding, increased binding affinity being correlated with a lower Kd.

[0103] By “binding domain” it is meant a protein domain that is able to bind non-covalently to another molecule. A binding domain can bind to, for example, an RNA molecule (an RNA-binding domain) and/or a protein molecule (a protein-binding domain). In the case of a protein having a protein-binding domain, it can in some cases bind to itself (to form homodimers, homotrimers, etc.) and/or it can bind to one or more regions of a different protein or proteins.

[0104] The term “conservative amino acid substitution” refers to the interchangeability in proteins of amino acid residues having similar side chains. For example, a group of amino acids having aliphatic side chains consists of glycine, alanine, valine, leucine, and isoleucine; a group of amino acids having aliphatic-hydroxyl side chains consists of serine and threonine; a group of amino acids having amide containing side chains consisting of asparagine and glutamine; a group of amino acids having aromatic side chains consists of phenylalanine, tyrosine, and tryptophan; a group of amino acids having basic side chains consists of lysine, arginine, and histidine; a group of amino acids having acidic side chains consists of glutamate and aspartate; and a group of amino acids having sulfur containing side chains consists of cysteine and methionine. Exemplary conservative amino acid substitution groups are: valine-leucine-isoleucine, phenylalanine-tyrosine, lysine-arginine, alanine-valine-glycine, and asparagine-glutamine.

[0105] The terms “DNA regulatory sequences,” “control elements,” and “regulatory elements,” used interchangeably herein, refer to transcriptional and translational control sequences, such as promoters, enhancers, polyadenylation signals, terminators, protein degradation signals, and the like, that provide for and/or regulate transcription of a non-coding sequence (e.g., guide RNA) or a coding sequence (e.g., protein coding) and/or regulate translation of an encoded polypeptide.

[0106] As used herein, a “promoter sequence” is a DNA regulatory region capable of binding RNA polymerase and initiating transcription of a downstream (3′ direction) coding or non-coding sequence. Eukaryotic promoters will often, but not always, contain “TATA” boxes and “CAT” boxes. Various promoters, including inducible promoters, may be used to drive the various nucleic acids (e.g., vectors) of the present disclosure.

[0107] The term “naturally-occurring” or “unmodified” or “wild type” as used herein as applied to a nucleic acid, a polypeptide, a cell, or an organism, refers to a nucleic acid, polypeptide, cell, or organism that is found in nature.

[0108] “Recombinant,” as used herein, means that a particular nucleic acid (DNA or RNA) is the product of various combinations of cloning, restriction, polymerase chain reaction (PCR) and/or ligation steps resulting in a construct having a structural coding or non-coding sequence distinguishable from endogenous nucleic acids found in natural systems. DNA sequences encoding polypeptides can be assembled from cDNA fragments or from a series of synthetic oligonucleotides, to provide a synthetic nucleic acid which is capable of being expressed from a recombinant transcriptional unit contained in a cell or in a cell-free transcription and translation system. Genomic DNA comprising the relevant sequences can also be used in the formation of a recombinant gene or transcriptional unit. Sequences of non-translated DNA may be present 5′ or 3′ from the open reading frame, where such sequences do not interfere with manipulation or expression of the coding regions, and may indeed act to modulate production of a desired product by various mechanisms (see “DNA regulatory sequences”, below). Alternatively, DNA sequences encoding RNA (e.g., guide RNA) that is not translated may also be considered recombinant. Thus, e.g., the term “recombinant” nucleic acid refers to one which is not naturally occurring, e.g., is made by the artificial combination of two otherwise separated segments of sequence through human intervention. This artificial combination is often accomplished by either chemical synthesis means, or by the artificial manipulation of isolated segments of nucleic acids, e.g., by genetic engineering techniques. Such is usually done to replace a codon with a codon encoding the same amino acid, a conservative amino acid, or a non-conservative amino acid. Alternatively, it is performed to join together nucleic acid segments of desired functions to generate a desired combination of functions. This artificial combination is often accomplished by either chemical synthesis means, or by the artificial manipulation of isolated segments of nucleic acids, e.g., by genetic engineering techniques. When a recombinant polynucleotide encodes a polypeptide, the sequence of the encoded polypeptide can be naturally occurring (“wild type”) or can be a variant (e.g., a mutant) of the naturally occurring sequence. Thus, the term “recombinant” polypeptide does not necessarily refer to a polypeptide whose sequence does not naturally occur. Instead, a “recombinant” polypeptide is encoded by a recombinant DNA sequence, but the sequence of the polypeptide can be naturally occurring (“wild type”) or non-naturally occurring (e.g., a variant, a mutant, etc.). Thus, a “recombinant” polypeptide is the result of human intervention, but may be a naturally occurring amino acid sequence.

[0109] A “vector” or “expression vector” is a replicon, such as plasmid, phage, virus, or cosmid, to which another DNA segment, i.e. an “insert”, may be attached so as to bring about the replication of the attached segment in a cell.

[0110] An “expression cassette” comprises a DNA coding sequence operably linked to a promoter. “Operably linked” refers to a juxtaposition wherein the components so described are in a relationship permitting them to function in their intended manner For instance, a promoter is operably linked to a coding sequence if the promoter affects its transcription or expression.

[0111] The terms “recombinant expression vector,” or “DNA construct” are used interchangeably herein to refer to a DNA molecule comprising a vector and one insert. Recombinant expression vectors are usually generated for the purpose of expressing and/or propagating the insert(s), or for the construction of other recombinant nucleotide sequences. The insert(s) may or may not be operably linked to a promoter sequence and may or may not be operably linked to DNA regulatory sequences.

[0112] Any given component, or combination of components can be unlabeled, or can be detectably labeled with a label moiety. In some cases, when two or more components are labeled, they can be labeled with label moieties that are distinguishable from one another.

[0113] “Label” or “labelling” refers to a component with a molecule that renders the component identifiable by one or more techniques. Non-limiting examples of labels include streptavidin and fluorescent molecules. The term “fluorescer” refers to a substance or a portion thereof which is capable of exhibiting fluorescence in the detectable range. The labels may be detected by a binding interaction with a label (e.g. biotin binding streptavidin) or through detection of a fluorescent signal using a fluorimeter. Other detectable labels include enzymatic labels such as luciferase, peroxidase or alkaline phosphatase. A “reporter gene” or “reporter sequence” refers to any sequence that produces a protein product that is easily measured, preferably although not necessarily in a routine assay. Suitable reporter genes include, but are not limited to, sequences encoding colored or fluorescent or luminescent proteins (e.g., green fluorescent protein, enhanced green fluorescent protein, red fluorescent protein). In some embodiments, enzymatic labels are inactivated by way of being split into two or more pieces that are linked by a nucleic acid linker that is targetable by CRISPR enzyme activity (e.g. trans cleavage following activation by the presence of a primary activator). Upon cleavage of the linker, the pieces of the enzymatic reporter would be able to assemble into an active enzyme that could act on a substrate to generate a detectable signal.

[0114] The term “sample” is used herein to mean any sample that includes RNA or DNA (e.g., in order to determine whether a target sequence is present among a population of polynucleotide sequences). The sample can be derived from any source, e.g., the sample can be a synthetic combination of purified RNAs/DNAs; the sample can be a cell lysate, an RNA/DNA-enriched cell lysate, or RNA/DNAs isolated and/or purified from a cell lysate. The sample may be an environmental sample, an agricultural sample or a food sample. The sample can be from a patient (e.g., for the purpose of diagnosis). The sample may be selected or derived from one or more of blood, sweat, plasma, serum, sputum, saliva, mucus, cells, excrement, urine, cerebrospinal fluid (CSF), breast milk, semen, vaginal fluid, tissue, etc. The sample can be from permeabilized cells.

[0115] The sample can be from crosslinked cells. The sample can be in tissue sections. The sample can be from tissues prepared by crosslinking followed by delipidation and adjustment to make a uniform refractive index. Examples of tissue preparation by crosslinking followed by delipidation and adjustment to make a uniform refractive index have been described in, for example, Shah et al., Development (2016) 143, 2862-2867 doi:10.1242/dev.138560.

[0116] Where a range of values is provided, it is understood that each intervening value, to the tenth of the unit of the lower limit unless the context clearly dictates otherwise, between the upper and lower limit of that range and any other stated or intervening value in that stated range, is encompassed within the invention. The upper and lower limits of these smaller ranges may independently be included in the smaller ranges, and are also encompassed within the invention, subject to any specifically excluded limit in the stated range. Where the stated range includes one or both of the limits, ranges excluding either or both of those included limits are also included in the invention.

[0117] Unless defined otherwise, all technical and scientific terms used herein have the same meaning as commonly understood by one of ordinary skill in the art to which this invention belongs. Although any methods and materials similar or equivalent to those described herein can also be used in the practice or testing of the present invention, the preferred methods and materials are now described. All publications mentioned herein are incorporated herein by reference to disclose and describe the methods and/or materials in connection with which the publications are cited.

[0118] It must be noted that as used herein and in the appended claims, the singular forms “a,” “an,” and “the” include plural referents unless the context clearly dictates otherwise. Thus, for example, reference to a “CRISPR/Cas effector protein” includes a plurality of CRISPR/Cas effector proteins (including the same or different Cas effector proteins) and reference to “the guide RNA” includes reference to one or more guide RNAs and equivalents thereof known to those skilled in the art, and so forth. It is further noted that the claims may be drafted to exclude any optional element. As such, this statement is intended to serve as antecedent basis for use of such exclusive terminology as “solely,” “only” and the like in connection with the recitation of claim elements, or use of a “negative” limitation.

[0119] It is appreciated that certain features of the invention, which are, for clarity, described in the context of separate embodiments, may also be provided in combination in a single embodiment. Conversely, various features of the invention, which are, for brevity, described in the context of a single embodiment, may also be provided separately or in any suitable sub-combination. All combinations of the embodiments pertaining to the invention are specifically embraced by the present invention and are disclosed herein just as if each and every combination was individually and explicitly disclosed. In addition, all sub-combinations of the various embodiments and elements thereof are also specifically embraced by the present invention and are disclosed herein just as if each and every such sub-combination was individually and explicitly disclosed herein.

[0120] The publications discussed herein are provided solely for their disclosure prior to the filing date of the present application. Nothing herein is to be construed as an admission that the present invention is not entitled to antedate such publication by virtue of prior invention. Further, the dates of publication provided may be different from the actual publication dates which may need to be independently confirmed. The compositions, methods, and systems for detecting the presence or absence of specific target nucleic acid sequence (e.g. RNA or DNA) in a sample allow for cost-effectively diagnosing a patient or sample having a viral, bacterial, parasitic, or fungal infection, or a condition, disease, or disorder by identification by the presence of one or more specific nucleic acid sequences. The compositions, methods and systems of the invention are also useful in genetic screening, cancer screening, mutational analysis, microRNA analysis, mRNA analysis, single nucleotide polymorphism analysis, etc.

### Compositions and Systems

[0121] Provided are compositions, systems and methods for detecting a target RNA or DNA sequence (double stranded or single stranded) in a sample. In particular, described herein are systems comprising an internal NCR which generates an amplifying, feed-forward loop to provide an exponential increase in the signal upon detection of a target nucleic acid. The systems and methods can comprise any number and type of detection and/or amplification components, for example a system comprising at least a first component comprising a detector that is capable of detecting a nucleic acid of interest and generating a signal following detection and a second component comprising an amplifier that increases (amplifies) the signal generated in the presence of the nucleic acid of interest. The components (e.g., detector and/or amplifier) may comprise any number of the same or different molecules, including but not limited to nucleic acid binding molecules such as split-enzymes, Ttago (argonaute) proteins, programmable single guide RNAs, etc.

[0122] The compositions and systems described herein can include (i) a target sensor comprising a first Cas effector protein (e.g., a Cas13 protein for detection of RNA, a Cas12 protein or Cas14 for detection of DNA) in association with a first guide RNA, which first guide RNA recognizes (hybridizes) to the RNA or DNA target sequence of the sample (the primary activator); (ii) an inactive reporter molecule (complex) comprising a detectable label (e.g., fluorescent moiety) linked to a quencher via a sequence not recognized by the first guide RNA, which reporter is activated upon cleavage, for example cleavage (e.g. trans cleavage) by a nuclease that releases the detectable label from the complex (e.g., cleavage of sequence linking the label to quencher or cage) such that it can be measured; (iii) a signal amplifier comprising a second Cas effector protein in association with the second guide RNA or a signal amplifier comprising a second Cas effector protein in the presence of a caged guide RNA such that the signal amplifier is not active until the cage has been released; and (iv) an activator molecule (also referred to herein an “amplifying activator”) comprising a sequence that is recognized by the second guide RNA of the signal amplifier, optionally wherein the activator molecule is part of the inactive reporter complex, in which binding to the activator to the signal amplifier (e.g., hybridization of the activator to the guide RNA of the signal amplifier) activates the signal amplifier such that is becomes a non-specific nuclease capable of cleaving the reporter to release the detectable label.

[0123] As shown in FIG. 1A-1J, upon hybridization (binding) of first Cas effector protein to the primary activator sequence (via the first guide RNA) to the target sensor, an activated primary activator complex comprising a non-specific RNase (Cas13 effector) or DNase (Cas12 effector or Cas14 effector) is formed. This activated primary activator complex displays trans, non-specific nuclease activity, which then activates the reporter (detectable label) by cleaving the inactive reporter complex such that the label is detectable (no longer quenched), where this reaction only occurs in the presence of the target. In addition, the activated primary activator complex may release the activator molecule such that the second guide RNA of the secondary amplifier complex hybridizes with the released activator molecule, or the secondary guide is released to bind with the Cas protein that lacks a complexed guide RNA (apo Cas protein) and free activator. When hybridized to the activator molecule, the secondary amplifier complex becomes an activated non-specific trans RNase or trans DNase capable of cleaving inactive reporter complexes, such that further detectable label is released or the trans cleavage activity acts such that a cage is released allowing a caged activator RNA and/or a caged guide RNA to interact with the secondary amplifier complex. This process is termed “Feed forward amplification”. The presence of two activated sensors (the primary activator complex and the secondary amplifier complex) amplifies the signal obtained in the presence of the primary activator sequence for rapid and sensitive detection. In this system, the primary activator complex results in linear amplification of signal from the detection of the primary activator complex while the addition of the secondary amplification system results in exponential amplification. In some cases, the cage comprises one or more stem loop structures. In some cases, the loop structures are caused on an RNA by the addition of complementary sequences that will fold back on the RNA, in some cases leaving a single stranded loop. In this way, the addition of the cage sequences causes the formation of one or more stem loops on an RNA.

[0124] Thus, the disclosed systems provide for inexpensive and rapid detection of nucleic acid target sequences from a variety of sources including mammals, viruses, bacteria, fungi, etc. with minimal sample preparation, and specifically without the need to amplify nucleic acids from the sample. The samples may be biological samples from a human or non-human patient, or an environmental sample from water, food, etc.

### Cas and Csm6 Sensors and Signal Amplifiers

[0125] Any Cas protein(s) can be used in the Cas-effector molecules (target sensor and/or signal amplifier) of the compositions and systems, including but not limited to Cas proteins from any type of CRISPR/Cas system (e.g., Type II, Type III, Type V, Type VI), Csm6 proteins, Csx1 proteins and the like.

[0126] The Cas proteins may be derived from any suitable source, including archaea and bacteria. In some embodiments, a native Cas protein may be derived from Paludibacter, Carnobacterium, Listeria, Herbinix, Rhodobacter, Leptotrichia, Lachnospiraceae, Eubacterium, or Clostridium. In some embodiments, the native Cas protein may be derived from Paludibacter propionicigenes, Carnobacterium gallinarum, Listeria seeligeri, Listeria newyorkensis, Herbinix hemicellulosilytica, Rhodobacter capsulatus, Leptotrichia wadei, Leptotrichia buccalis, Leptotrichia shahii, Lachnospiraceae bacterium NK4A179, Lachnospiraceae bacterium MA2020, Eubacterium rectale, Lachnospiraceae bacterium NK4A144, and Clostridium aminophilum.

[0127] The Cas protein(s) as described herein may be homologous to a native Cas protein. In some embodiments, the disclosed Cas protein is greater than 75%, 80%, 85%, 90%, 95%, 97%, 98%, or 99%, and less than about 100%, 99%, 98%, 97%, 95%, 90%, 85%, 80%, or 75% identical to a native Cas protein sequence. The disclosed Cas protein may have one or more HEPN domains, and may be able, after activation, to cleave single stranded RNA, including precursor guide RNA and indicator RNA.

[0128] Activation of a Cas protein may include contacting one or more target sequences with a guide RNA sequence associated with the Cas protein. In some embodiments, the guide RNA of the Cas protein may help to activate the Cas protein's RNase activity by hybridizing to a complementary target RNA sequence.

[0129] The disclosed Cas proteins may be any Cas protein, including but not limited to Type V (e.g., Cas12 and/or Cas14), Type VI (e.g., Cas13), and/or Type III (e.g., Csm6) proteins.

[0130] In certain embodiments, the compositions, systems and methods include one or more Cas13 protein with 4 currently characterized subtypes (Cas13a-d) that each exhibit significant sequence divergence apart from two consensus HEPN (Higher eukaryotes and prokaryotes nucleotide-binding domain) RNase motifs, R-X4-6-H. To defend against viral infection, Cas13 enzymes process precrRNA into mature crRNA guides in a HEPN-independent manner, followed by HEPN-dependent cleavage of a complementary “activator” target RNA in cis. Upon target-dependent activation, Cas13 is also able to cleave bystander RNAs in trans, reflecting a general RNase activity capable of both cis- and trans-cleavage. (See, e.g., U.S. Publication No. 20200032324 and WO2017218573, Konnermann et al (2018) Cell April 19; 173(3):665-676; Zhang et al (2018) Cell 175 (1), 212-223). The signature protein of Type VI-A CRISPR-Cas systems, Cas13a (formerly C2c2), is a dual nuclease responsible for both crRNA maturation and RNA-activated ssRNA cleavage (East-Seletsky et al., (2016) Nature 538(7624):270-273). Cas13a binds to precursor crRNA (pre-crRNA) transcripts and cleaves them within the repeat region to produce mature crRNAs. When the pre-crRNA is processed to the individual mature crRNAs, an 8 nucleotide piece of the repeat region that separates each of the spacer regions in a CRISPR array remains attached to the mature crRNA and is termed the “tag”. Binding to a ssRNA activator (target) sequence with complementarity to the crRNA activates Cas13a for trans-ssRNA cleavage, potentially triggering cell death or dormancy of the host organism. However, if the target or activator RNA comprises a sequence that is complementary to the tag sequence (known as the “anti-tag”) the complex is inhibited from being activated. This is thought to be a mechanism involved in preventing autoimmunity (Meeske & Marriffini (2018) Mol Cell 71:791). The Cas13a's trans-ssRNA activity can be exploited for use in releasing cage structures on RNAs; an activity that can be tunes by use of cage sequences that correspond to the preferences for the different Cas13a homologs.

[0131] In some embodiments, the Cas3 protein is a Cas13a polypeptide comprising an amino acid sequence having at least 7500, at least 8000, at least 850%, at least 900%, at least 95% at least 98i, at least 99, or 100%, amino acid sequence identity to any Cas3a amino acid sequence, for example a Cas13a sequence as shown in Table 1 and/or Example 3.

TABLE 1
Exemplary Cas13a proteins

| Cas13a | | |
|---|---|---|
| abbreviation | Organism name | Accession number |
| LshCas13a | Leptotrichia shahii | WP_018451595.1 |
| LwaCas13a | Leptotrichia wadei | WP_021746774.1 |
| LseCas13a | Listeria seeligeri | WP_012985477.1 |
| LbmCas13a | Lachnospiraceae bacterium MA2020 | WP_044921188.1 |
| LbnCas13a | Lachnospiraceae bacterium NK4A179 | WP_022785443.1 |
| CamCas13a | [Clostridium] aminophilum DSM 10710 | WP_031473346.1 |
| CgaCas13a | Carnobacterium gallinarum DSM 4847 | WP_034560163.1 |
| Cga2Cas13a | Carnobacterium gallinarum DSM 4847 | WP_034563842.1 |
| Pprcas13a | Paludibacter propionicigenes WB4 | WP_013443710.1 |
| LweCas13a | Listeria weihenstephanensis FSL R9-0317 | WP_036059185.1 |
| LneCas13a | Listeriaceae bacterium FSL M6-0635 (Listeria | WP_036091002.1 |
| | newyorkensis) | |
| Lwa2cas13a | Leptotrichia wadei F0279 | WP_021746774.1 |
| RcsCas13a | Rhodobacter capsulatus SB 1003 | WP_013067728.1 |
| RcrCas13a | Rhodobacter capsulatus R121 | WP_023911507.1 |
| RcdCas13a | Rhodobacter capsulatus DE442 | WP_023911507.1 |
| LbuCas13a | Leptotrichia buccalis | WP_015770004.1 |
| LbaCas13a | Lachnospiraceae bacterium NK4A179 | WP_022785443.1 |
| RcaCas13a | Rhodobacter capsulatus R121 | ETD76934.1 |
| EreCas13a | [Eubacterium] rectale | WP_055061018.1 |
| HheCas13a | Herbinix hemicellulosilytica | CRZ35554.1 |

[0132] Additional Cas13 proteins include BzoCas13b (Bergeyella zoohelcum; WP_002664492); PinCas13b (Prevotella intermedia; WP_036860899); PbuCas13b (Prevotella buccae; WP_004343973); AspCas13b (Alistipes sp. ZOR0009; WP_047447901); PsmCas13b (Prevotella sp. MA2016; WP_036929175); RanCas13b (Riemerella anatipestifer; WP_004919755); PauCas13b (Prevotella aurantiaca; WP_025000926); PsaCas13b (Prevotella saccharolytica, WP_051522484); Pin2Cas13b (Prevotella intermedia; WP_061868553); CcaCas13b (Capnocytophaga canimorsus; WP_013997271); PguCas13b (Porphyromonas gulae; WP_039434803); PspCas13b (Prevotella sp. P5-125, WP_0440652940); PgiCas13b (Porphyromonas gingivalis; WP_053444417); FbrCas13b (Flavobacterium branchiophilum; WP_014084666); and Pin3Cas13b (Prevotella intermedia; WP_050955369); FnsCas13c (Fusobacterium necrophorum subsp. funduliforme ATCC 51357contig00003; WP_005959231.1); FndCas13c (Fusobacterium necrophorum DJ-2 contig0065, whole genome shotgun sequence; WP_035906563.1); FnfCas13c (Fusobacterium necrophorum subsp. funduliforme 1_1_36S cont1.14; EH019081.1); FpeCas13c (Fusobacterium perfoetens ATCC 29250 T364DRAFT_scaffold00009.9_C; WP_027128616.1); FulCas13c (Fusobacterium ulcerans ATCC 49185 cont2.38; WP_040490876.1); AspCas13c (Anaerosalibacter sp. ND1 genome assembly Anaerosalibacter massiliensis ND1; WP_042678931.1); Ruminococcus sp Cas13d, (GI: 1690532978); EsCas13d ([Eubacterium] siraeum DSM 15702; GI: 1486942132 or GI: 1486942131) and the Cas13d homologs disclosed in U.S. Patent Publication 20190062724.

[0133] In certain embodiments, the compositions, systems and methods include one or more Type V Cas proteins. Non-limiting examples of Type V CRISPR/Cas proteins include Cas12 and Cas14 proteins. See, e.g., U.S. Publication No. 20190241954. In some embodiments, the Cas12 protein is a Cas12 polypeptide comprising an amino acid sequence having at least 75%, at least 80%, at least 85%, at least 90%, at least 95%, at least 98%, at least 99%, or 100%, amino acid sequence identity to any Cas12 amino acid sequence, for example a Cas12 sequence as shown in FIG. 6A-6C. See e.g. PCT/US2020/021213, WO2020023529, WO 2019104058 and WO2019089796.

[0134] In some embodiments, the Cas14 protein is a Cas14 polypeptide comprising an amino acid sequence having at least 75%, at least 80%, at least 85%, at least 90%, at least 95%, at least 98%, at least 99%, or 100%, amino acid sequence identity to any Cas14 amino acid sequence, for example a Cas14 sequence as shown in FIG. 6. See e.g. Harrington et al (Harrington L B, (2018) Science 362(6416):839-842) and PCT/US2020/021214 (Cas14). See e.g. PCT/US2020/021214.

[0135] In certain embodiments, the systems, compositions and methods described herein comprises a Csm6 protein. Csm6 is a family of single-stranded ribonucleic acid (ssRNA) endonucleases associated with Type III CRISPR-Cas systems. The RNA cleavage activity of Csm6 can be allosterically activated by binding of either cyclic oligoadenylates (cAₙ) or short linear oligoadenylates bearing a terminal 2′-3′ cyclic phosphate (Aₙ>P). Csm6 has been used in the SHERLOCK system to amplify the detection of viral RNAs. In some embodiments, EiCasm6 (Enterococcus italicus; WP_007208953.1), LsCsm6 (Lactobacillus salivarius; WP_081509150.1) and/or TtCsm6 (Thermus thermophilus; WP_011229148.1) is used. In one embodiment, the TtCsm6 is activated specifically by oligoadenylates with a length of four adenosines (cA₄ or A₄>P), and exhibits a cleavage preference for RNA sequences with A's and C's. In one embodiment, EiCsm6 and/or LsCsm6 is used with a guide comprising an A₆ length to amplify the signal following cleavage of a protected (caged) amplifier RNA. Accordingly, Csm6 variants can be used for amplification of detectable signal in the presence of the target, for example by inclusion of a suitable substrate (e.g., trigger substrate) comprising such preferred sequences. For example, in some embodiments, an A₆U₅ (SEQ ID NO: 270) comprising RNA is added to a reaction mixture comprising Cas13 and EiCsm6 such that upon activation of Cas13 following interaction with its primary RNA activator, trans cleavage by Cas13 of the A₆U₆ RNA (SEQ ID NO: 271) will create an activator for the EiCsm6 leading EiCsm6 to cleave the reporter molecule, thus amplifying the signal initiated by the original interaction of the Cas13 with its primary activator. In another embodiment, an A₅Uₓ RNA is used in the reaction which comprises TtCsm6 rather than EiCsm6 (Gootenberg et al, (2018) Science 360(6387): 439).

[0136] In an embodiment, the Cas protein is a modified protein that is modified, or engineered or mutated, to alter its interaction with guide or target sequences and/or to alter its nuclease activity, for example specificity, turn-over, nucleotide preferences, etc. In other embodiments, the Cas protein may be fused to another protein, peptide, or marker to aid in isolation, identification, separation, nuclease activity, target sequence binding, etc.

[0137] In some cases, RNA (viral RNA, mRNA, small RNAs, etc.) is directly detected (without the need for reverse transcriptase) using systems comprising wild-type and/or modified Cas13 proteins, while DNA (viral DNA, etc.) is directly detected using systems comprising wild-type and/or engineered Cas12 or Cas14 proteins. In other cases, RNA can be reverse transcribed into DNA detected using Cas12 or Cas14 effector proteins.

[0138] One or more of the same or different Cas effector proteins can be used in the systems described herein. In some cases, the target sensor and the signal amplifier both comprise one or more Cas12 proteins and/or Cas14 proteins, for example for the detection of DNA target sequences. The one or more Cas12 and/or Cas14 proteins may themselves be the same or different (modified or engineered) proteins. In other cases, the target sensor and the signal amplifier both comprise one or more Cas13 proteins, for example for the detection of RNA target sequences. The Cas13 proteins may themselves be the same proteins may be different (modified or engineered) Cas13 proteins. In other embodiments, the target sensor and the signal amplifier may comprise different types of Cas-effector proteins, including Cas12, Cas13, Cas14 and Csm6 proteins, for example wherein the target sensor comprises one or more Cas13 proteins for detection of an RNA target sequence and the signal amplifier comprises one or more Cas12 and/or Cas14 proteins. In some cases, the signal amplifier also comprises a Csm6 protein (enzyme). In some embodiments, the target sensor comprises one or more Cas12 and/or Cas14 proteins for detection of a nucleic acid target sequence and the signal amplifier comprises one or more Cas13 proteins. In some cases, the signal amplifier also comprises a Csm6 protein (enzyme).

### Guide RNA Sequences

[0139] The NCR systems and compositions as described herein also include a molecule, typically a guide RNA, used to program the one or more Cas proteins such that they are activated into nucleases upon binding of the guide RNA to a cognate (target, activator, etc.) sequence.

[0140] A nucleic acid molecule associates with (binds to) a Cas effector protein (e.g., a Cas13 or Cas12 protein), forming a ribonucleoprotein complex (RNP), and targets the complex to a specific target sequence within the polynucleotide is referred to herein as a “guide RNA.” It is to be understood that in some cases, a hybrid DNA/RNA can be made such that a guide RNA includes DNA bases in addition to RNA bases—but the term “guide RNA” is still used herein to encompass such hybrid molecules. A subject guide RNA may include a guide sequence (also referred to as a “spacer”) (that hybridizes to target sequence of a target RNA or DNA) and a constant region (e.g., a region that is adjacent to the guide sequence and binds to the Cas effector protein). A “constant region” can also be referred to herein as a “protein-binding segment.” In some cases, the constant region is 5′ of the guide sequence.

[0141] Guide RNAs include at least one sequence complementary to a target RNA sequence. In some embodiments, this target-complementary sequence may be referred to as a spacer sequence, additional sequences may be referred to as scaffold sequences. In some embodiments, the spacer sequence is derived from a human (e.g. genomic DNA or reverse transcribed RNA) or non-human source (for example a pathogen). In some embodiments, the pathogen selected may be from bacteria, viruses, fungi, and parasites.

[0142] In some embodiments, the pathogen may be a virus (e.g., Orthocoronavirinae, Dependovirus, Picornaviridae, Poxviridae, Flaviviridae, Rhabdoviridae, Togaviridae, Filoviridae, Herpesviridae, Bunyaviridae, Hepadnaviridae, Adenoviridae, Retroviridae, Papillomaviridae, Pneumoviridae, Orthomyxoviridae, Arenaviridae, and Paramyxoviridae, Caliciviridae) or a bacterium (e.g., Mycobacterium, Streptococcus Pseudomonas, Shigella, Campylobacter, Salmonella, Clostridium, Corynebacterium, and Treponema). In some embodiments the virus may be selected from DNA or RNA viruses including Orthocoronavirinae, Adenoviridae, Picornaviridae, Herpesviridae, Hepadnaviridae, Flaviviridae, Retroviridae, Orthomyxoviridae, Paramyxoviridae, Papovaviridae, Polyomavirus, Rhabdoviridae, and Togaviridae. In some embodiments, pathogenic fungi include Candida, Aspergillus, Cryptococcus, Histoplasma, Pneumosystis, and Stachybotrys.

[0143] In other embodiments, the spacer RNA sequence is complementary to a non-pathogen. For example, the spacer RNA sequence may be engineered to hybridize to any nucleic acid sequence of interest. In some embodiments, the guide RNA sequence may be engineered to be complementary to a mammalian sequence of interest, for example a genomic sequence, or transcribed sequence (mRNA, microRNA, etc.). In various embodiments, the guide RNA may include a sequence complementary to a sequence associated with a mammalian biological state, condition, disease, or disorder, such as sepsis, cancer, viral infection, bacterial infection, fungal infection. In some embodiments, the guide RNAs may be complementary to a mRNA or micro RNA, for example a microRNA sequence in a microRNA signature. In some embodiments, the guide RNA sequence may be within a precursor RNA, which may, in turn be part of an array with a plurality of guide RNA sequences. In some embodiments, precursor RNA sequences may be processed by the Cas protein to provide guide RNA sequences.

[0144] Guide RNA sequences include the spacer sequence, which is complementary to the target sequence, and a more constant sequence that is 5′ of the spacer sequence. This constant sequence may be referred to as a scaffold sequence, repeat, handle, or constant region and aids in binding the guide RNA to the Cas protein. In some embodiments, the constant sequence can be replaced with that of an evolutionarily related constant sequence. As is known in the art, Cas proteins may be grouped into different families comprising functional groups that recognize orthogonal sets of crRNAs and possess different ssRNA cleavage specificity. In some embodiments, the constant sequence can be modified to improve affinity and stability by including naturally occurring and synthetic or non-natural nucleobases or backbone modifications. In some embodiments, the constant sequence may include a precursor sequence. In an embodiment, a pre-crRNA sequence may be processed to form a crRNA sequence, which includes the guide sequence.

[0145] The guide sequence having complementarity with (hybridizes to) a target sequence of the target RNA or DNA sequence can be of any suitable length. In some cases, the guide sequence is 15-28 nucleotides (nt) in length (e.g., 15-26, 15-24, 15-22, 15-20, 15-18, 16-28, 16-26, 16-24, 16-22, 16-20, 16-18, 17-26, 17-24, 17-22, 17-20, 17-18, 18-26, 18-24, or 18-22 nt in length). In some cases, the guide sequence is 18-24 nucleotides (nt) in length. In some cases, the guide sequence is at least 15 nt long (e.g., at least 16, 18, 20, or 22 nt long). In some cases, the guide sequence is at least 17 nt long. In some cases, the guide sequence is at least 18 nt long. In some cases, the guide sequence is at least 20 nt long.

[0146] In some cases, the guide sequence has 80% or more (e.g., 85% or more, 90% or more, 95% or more, or 100% complementarity) with the target sequence of the target sequence. In some cases, the guide sequence is 100% complementary to the target sequence. In some cases, the target sequence includes at least 15 nucleotides (nt) of complementarity with the guide sequence of the guide RNA.

[0147] The guide RNA can be provided as RNA or as a nucleic acid encoding the guide RNA (e.g., a DNA such as a recombinant expression vector). The Cas effector protein (e.g., a Cas 13 protein such as Cas13a, LwaCas13a, LseCas13a, LbmCas13a, LbnCas13a, CamCas13a, CgaCas13a, Cga2Cas13a, Pprcas13a, LweCas13a, LneCas13a, Lwa2cas13a, RcsCas13a, RcrCas13a, RcdCas13a, LbuCas13a, RcaCas13a, EreCas13a, BzoCas13b, PinCas13b, PbuCas13b, AspCas13b, PsmCas13b, RanCas13b, PauCas13b, PsaCas13b, Pin2Cas13b, CcaCas13b, PguCas13b, PigCas13b, Pin3Cas13b and HheCas13a, EsCas13d ([Eubacterium] siraeum DSM 15702, UrCas13d, Cas13d isolated from Ruminococcus species, Cas13d isolated from gut metagenomes, Cas13d from new_flavefaciens,_strain_XPD3002 (see e.g. U.S. Patent Application 20190062724), and/or a Cas12 protein such as Cas12a, Cas12b, Cas12c, Cas12d, Cas12e and/or a Cas14 protein such as Cas14a, Cas14b, Cas14c, Cas14i, Cas14j, Cas14k, Cas14u) can be provided as a protein or as a nucleic acid encoding the protein (e.g., an mRNA, a DNA such as a recombinant expression vector) (Harrington et al (2018) Science 362(6416):839-842). In some cases, two or more (e.g., 3 or more, 4 or more, 5 or more, or 6 or more) guide RNAs can be provided by (e.g., using a precursor guide RNA array, which can be cleaved by the Cas effector protein into individual (“mature”) guide RNAs).

[0148] A Cas protein comprising a guide RNA may be referred to as a “programmed” Cas protein. Guide RNA sequences may be introduced to and bound by a Cas protein. For example, the guide RNA may contact the Cas protein in a cell or outside a cell. Various methods may be used to contact the guide RNA with the Cas protein to produce a programmed Cas protein. In some embodiments, contacting requires less than about 2 hours, for example less than about 90 min., 60 min., 40 min., 30 min., 20 min., 10 min., 5 min., 4 min., 3 min., 2 min., or 1 min.

### Constant Region

[0149] Any constant region can be used in the guide RNAs of the invention. Non-limiting examples of constant regions are disclosed in U.S. Publication No. 20190241954.

[0150] In some cases, the guide RNA includes a double stranded RNA duplex (dsRNA duplex). In some cases, a guide RNA includes a dsRNA duplex with a length of from 2 to 12 bp (e.g., from 2 to 10 bp, 2 to 8 bp, 2 to 6 bp, 2 to 5 bp, 2 to 4 bp, 3 to 12 bp, 3 to 10 bp, 3 to 8 bp, 3 to 6 bp, 3 to 5 bp, 3 to 4 bp, 4 to 12 bp, 4 to 10 bp, 4 to 8 bp, 4 to 6 bp, or 4 to 5 bp). In some cases, a guide RNA includes a dsRNA duplex that is 2 or more bp in length (e.g., 3 or more, 4 or more, 5 or more, 6 or more, or 7 or more bp in length). In some cases, a guide RNA includes a dsRNA duplex that is longer than the dsRNA duplex of a corresponding wild type guide RNA. In some cases, a guide RNA includes a dsRNA duplex that is shorter than the dsRNA duplex of a corresponding wild type guide RNA.

[0151] In some cases, the constant region of a guide RNA is 15 or more nucleotides (nt) in length (e.g., 18 or more, 20 or more, 21 or more, 22 or more, 23 or more, 24 or more, 25 or more, 26 or more, 27 or more, 28 or more, 29 or more, 30 or more, 31 or more nt, 32 or more, 33 or more, 34 or more, or 35 or more nt in length). In some cases, the constant region of a guide RNA is 18 or more nt in length.

[0152] In some cases, the constant region of a guide RNA has a length in a range of from 12 to 100 nt (e.g., from 12 to 90, 12 to 80, 12 to 70, 12 to 60, 12 to 50, 12 to 40, 15 to 100, 15 to 90, 15 to 80, 15 to 70, 15 to 60, 15 to 50, 15 to 40, 20 to 100, 20 to 90, 20 to 80, 20 to 70, 20 to 60, 20 to 50, 20 to 40, 25 to 100, 25 to 90, 25 to 80, 25 to 70, 25 to 60, 25 to 50, 25 to 40, 28 to 100, 28 to 90, 28 to 80, 28 to 70, 28 to 60, 28 to 50, 28 to 40, 29 to 100, 29 to 90, 29 to 80, 29 to 70, 29 to 60, 29 to 50, or 29 to 40 nt). In some cases, the constant region of a guide RNA has a length in a range of from 28 to 100 nt. In some cases, the region of a guide RNA that is 5′ of the guide sequence has a length in a range of from 28 to 40 nt.

[0153] In some cases, the constant region of a guide RNA is truncated relative to (shorter than) the corresponding region of a corresponding wild type guide RNA. In some cases, the constant region of a guide RNA is extended relative to (longer than) the corresponding region of a corresponding wild type guide RNA. In some cases, a subject guide RNA is 30 or more nucleotides (nt) in length (e.g., 34 or more, 40 or more, 45 or more, 50 or more, 55 or more, 60 or more, 65 or more, 70 or more, or 80 or more nt in length). In some cases, the guide RNA is 35 or more nt in length.

### Precursor Guide RNA Array

[0154] The Cas effector protein can cleave a precursor guide RNA into a mature guide RNA, e.g., by endoribonucleolytic cleavage of the precursor, for example by cleaving a precursor guide RNA array (that includes more than one guide RNA arrayed in tandem) into two or more individual guide RNAs. Thus, in some cases a precursor guide RNA array comprises two or more (e.g., 3 or more, 4 or more, 5 or more, 2, 3, 4, or 5) guide RNAs (e.g., arrayed in tandem as precursor molecules). In other words, in some cases, two or more guide RNAs can be present on an array (a precursor guide RNA array). A Cas effector protein as described herein can cleave the precursor guide RNA array into individual guide RNAs.

[0155] In some cases, a subject guide RNA array includes 2 or more guide RNAs (e.g., 3 or more, 4 or more, 5 or more, 6 or more, or 7 or more, guide RNAs). The guide RNAs of a given array can target (i.e., can include guide sequences that hybridize to) different target sites of the same target RNA/DNA (e.g., which can increase sensitivity of detection) and/or can target different target RNA/DNA molecules (e.g., single nucleotide polymorphisms (SNPs), different strains of a particular virus, etc.), and such could be used for example to detect multiple strains of a virus. In some cases, each guide RNA of a precursor guide RNA array has a different guide sequence. In some cases, two or more guide RNAs of a precursor guide RNA array have the same guide sequence.

[0156] In some cases, the precursor guide RNA array comprises two or more guide RNAs that target different target sites within the same target sequence. In some cases, the precursor guide RNA array comprises two or more guide RNAs that target different target sequences. For example, such a scenario can result in a positive signal when any one of a family of potential target RNAs/DNAs is present. Such an array could be used for targeting a family of transcripts, e.g., based on variation such as single nucleotide polymorphisms (SNPs) (e.g., for diagnostic purposes). Such could also be useful for detecting whether any one of a number of different strains of virus is present. Such could also be useful for detecting whether any one of a number of different species, strains, isolates, or variants of a virus or bacterium is present. As such, in some cases as subject composition (e.g., kit) or method includes two or more guide RNAs (in the context of a precursor guide RNA array, or not in the context of a precursor guide RNA array, e.g., the guide RNAs can be mature guide RNAs).

### Protospacer Adjacent Motif (PAM)

[0157] In cases where the target sequence is a dsDNA, identification of a PAM sequence in the target may be required. A Type V CRISPR/Cas effector protein binds to target DNA at a target sequence defined by the region of complementarity between the DNA-targeting RNA and the target DNA. As is the case for many CRISPR/Cas endonucleases, site-specific binding (and/or cleavage) of a double stranded target DNA occurs at locations determined by both (i) base-pairing complementarity between the guide RNA and the target DNA; and (ii) a short motif [referred to as the protospacer adjacent motif (PAM)] in the target DNA.

[0158] In some cases, the PAM for a Type V CRISPR/Cas effector protein is immediately 5′ of the target sequence (e.g., of the non-complementary strand of the target DNA—the complementary strand hybridizes to the guide sequence of the guide RNA while the non-complementary strand does not directly hybridize with the guide RNA and is the reverse complement of the non-complementary strand). In some cases (e.g., when Cas12a or Cas12b as described herein is used), the PAM sequence is 5′-TTN-3′. In some cases, the PAM sequence is 5′-TTTN-3′.

[0159] In some cases, different Type V CRISPR/Cas effector proteins (i.e., Type V CRISPR/Cas effector proteins from various species) may be advantageous to use in the various provided methods in order to capitalize on a desired feature (e.g., specific enzymatic characteristics of different Type V CRISPR/Cas effector proteins). Type V CRISPR/Cas effector proteins from different species may require different PAM sequences in the target DNA. Thus, for a particular Type V CRISPR/Cas effector protein of choice, the PAM sequence requirement may be different than the 5′-TTN-3′ or 5′-TTTN-3′ sequence described above. Various methods (including in silico and/or wet lab methods) for identification of the appropriate PAM sequence are known in the art and are routine, and any convenient method can be used.

[0160] Members of the CRISPR-Cas13 system work as dual-component systems, in which a crRNA forms a complex with the Cas13 protein without involving any tracrRNA. The flanking regions of protospacers comprise a 3′ protospacer flanking site (PFS) that affects the efficacy of Cas13a-mediated targeting (Abudayyeh et al (2016) Science. 353(6299)) Although the PFS is adjacent to the protospacer target, the commonly used protospacer adjacent motif (PAM) nomenclature is not used as it has come to connote a sequence used in self vs. non-self differentiation, which is irrelevant in a RNA-targeting system. Thus, in some cases, identification of a PFS sequence in a target may be required.

### Reporters

[0161] Any reporter molecule (also referred to as a detector sequence) can be used in the systems described herein.

[0162] The reporter molecules (complexes) comprise a detectable label (also referred to a signal moiety). Non-limiting examples of detectable labels include fluorescent labels, enzymatic labels and/or bioluminescent labels. The reporter typically further comprises a molecule (also referred to as a “quencher” or “quencher molecule” or “quencher moiety”), which when in close proximity (linked) to the detectable label, prevents the label from being detected, for example by emitting a signal.

[0163] In some cases, a detectable signal is produced when the reporter molecule is cleaved (e.g., a quencher/fluor pair also referred to as an F/Q reporter). One signal partner of a signal quenching pair produces a detectable signal and the other signal partner is a quencher moiety that quenches the detectable signal of the first signal partner (i.e., the quencher moiety quenches the signal of the signal moiety such that the signal from the signal moiety is reduced (quenched) when the signal partners are in proximity to one another, e.g., when the signal partners of the signal pair are in close proximity).

[0164] For example, in some cases, an amount of detectable signal increases when the labeled reporter is cleaved. For example, in some cases, the signal exhibited by one signal partner (a signal moiety) is quenched by the other signal partner (a quencher signal moiety), e.g., when both are present on the same molecule prior to cleavage by a by the activated Cas non-specific nucleases (e.g., activated sensor and signal amplifier). Such a signal pair is referred to herein as a “quencher/fluor pair”, “quenching pair”, or “signal quenching pair.” For example, in some cases, one signal partner (e.g., the first signal partner) is a signal moiety that produces a detectable signal that is quenched by the second signal partner (e.g., a quencher moiety). The signal partners of such a quencher/fluor pair will thus produce a detectable signal when the partners are separated (e.g., after cleavage of the reporter molecule by the activated sensor or signal amplifier), but the signal will be quenched when the partners are in close proximity (e.g., prior to cleavage of the reporter).

[0165] The reporter typically includes amplifier activators substrates as described herein. In some cases, the amplifier activator sequence is positioned between the F/Q pair and may comprises A's or C's, but also accommodate additional nucleotides necessary for Cas13 (U), Cas12 (deoxyribonucleotides), Csm6, etc. activity, namely sequences bound by the Cas-effector protein of the signal amplifier. For example, reporters comprising Csm6 homologs that respond to A₆>P, like S. epidermidis Csm6 (SeCsm6) can generated by changing the number of A's from four to six in the hairpin loop of the caged crRNA.

[0166] The detectable label can include one or more modifications to reduce background activity and/or improve sensitivity. In some embodiments, the detectable label is comprised of a fluorophore and quencher molecule linked by an oligonucleotide sequence. Stem-loop structures can be exploited to increase the proximity of fluorophore to quencher, and loop length and sequence (such as U and A bases) can be incorporated to modulate the efficiency of their release by Cas nuclease activity. In some cases, the sequence of an oligo linking the fluorophore to the quencher comprises caged structures sensitive to release by specific trans nuclease activity. In some cases, the reporter molecule is associated with a trans caging molecule. A “trans caging molecule” can comprise any nucleic acid that binds to another nucleic acid such that a duplex structure is formed or created. In some cases, the duplex structure comprises one or more loops (e.g. stem loops).

[0167] A quencher moiety can quench a signal from the signal moiety (e.g., prior to cleavage) to various degrees. In some cases, a quencher moiety quenches the signal from the signal moiety where the signal detected in the presence of the quencher moiety (when the signal partners are in proximity to one another) is 95% or less of the signal detected in the absence of the quencher moiety (when the signal partners are separated). For example, in some cases, the signal detected in the presence of the quencher moiety can be 90% or less, 80% or less, 70% or less, 60% or less, 50% or less, 40% or less, 30% or less, 20% or less, 15% or less, 10% or less, or 5% or less of the signal detected in the absence of the quencher moiety. In some cases, no signal (e.g., above background) is detected in the presence of the quencher moiety.

[0168] In some cases, the signal detected in the absence of the quencher moiety (when the signal partners are separated) is at least 1.2 fold greater (e.g., at least 1.3 fold, at least 1.5 fold, at least 1.7 fold, at least 2 fold, at least 2.5 fold, at least 3 fold, at least 3.5 fold, at least 4 fold, at least 5 fold, at least 7 fold, at least 10 fold, at least 20 fold, or at least 50 fold greater) than the signal detected in the presence of the quencher moiety (when the signal partners are in proximity to one another).

[0169] In some cases, the signal moiety is a fluorescent label. In some such cases, the quencher moiety quenches the signal (the light signal) from the fluorescent label (e.g., by absorbing energy in the emission spectra of the label). Thus, when the quencher moiety is not in proximity with the signal moiety, the emission (the signal) from the fluorescent label is detectable because the signal is not absorbed by the quencher moiety. Any convenient donor acceptor pair (signal moiety/quencher moiety pair) can be used and many suitable pairs are known in the art.

[0170] In some cases, the quencher moiety absorbs energy from the signal moiety (also referred to herein as a “detectable label”) and then emits a signal (e.g., light at a different wavelength). Thus, in some cases, the quencher moiety is itself a signal moiety (e.g., a signal moiety can be 6-carboxyfluorescein while the quencher moiety can be 6-carboxy-tetramethylrhodamine), and in some such cases, the pair could also be a FRET pair. In some cases, a quencher moiety is a dark quencher. A dark quencher can absorb excitation energy and dissipate the energy in a different way (e.g., as heat). Thus, a dark quencher has minimal to no fluorescence of its own (does not emit fluorescence). Examples of dark quenchers are further described in U.S. Pat. Nos. 8,822,673 and 8,586,718; U.S. patent publications 20140378330, 20140349295, and 20140194611; and international patent applications: WO200142505 and WO200186001, all if which are hereby incorporated by reference in their entirety.

[0171] Examples of fluorescent labels include, but are not limited to: an Alexa Fluor™ dye, an ATTO dye (e.g., ATTO 390, ATTO 425, ATTO 465, ATTO 488, ATTO 495, ATTO 514, ATTO 520, ATTO 532, ATTO Rho6G, ATTO 542, ATTO 550, ATTO 565, ATTO Rho3B, ATTO Rho11, ATTO Rho12, ATTO Thio12, ATTO Rho101, ATTO 590, ATTO 594, ATTO Rho13, ATTO 610, ATTO 620, ATTO Rho14, ATTO 633, ATTO 647, ATTO 647N, ATTO 655, ATTO Oxa12, ATTO 665, ATTO 680, ATTO 700, ATTO 725, ATTO 740), a DyLight dye, a cyanine dye (e.g., Cy2, Cy3, Cy3.5, Cy3b, Cy5, Cy5.5, Cy7, Cy7.5), a FluoProbes dye, a Sulfo Cy dye, a Seta dye, an IRIS Dye, a SeTau dye, an SRfluor dye, a Square dye, fluorescein isothiocyanate (FITC), tetramethylrhodamine (TRITC), Texas Red, Oregon Green, Pacific Blue, Pacific Green, Pacific Orange, quantum dots, and a tethered fluorescent protein.

[0172] In some cases, a detectable label is a fluorescent label selected from: an Alexa Fluor™. dye, an ATTO dye (e.g., ATTO 390, ATTO 425, ATTO 465, ATTO 488, ATTO 495, ATTO 514, ATTO 520, ATTO 532, ATTO Rho6G, ATTO 542, ATTO 550, ATTO 565, ATTO Rho3B, ATTO Rho11, ATTO Rho12, ATTO Thio12, ATTO Rho101, ATTO 590, ATTO 594, ATTO Rho13, ATTO 610, ATTO 620, ATTO Rho14, ATTO 633, ATTO 647, ATTO 647N, ATTO 655, ATTO Oxa12, ATTO 665, ATTO 680, ATTO 700, ATTO 725, ATTO 740), a DyLight dye, a cyanine dye (e.g., Cy2, Cy3, Cy3.5, Cy3b, Cy5, Cy5.5, Cy7, Cy7.5), a FluoProbes dye, a Sulfo Cy dye, a Seta dye, an IRIS Dye, a SeTau dye, an SRfluor dye, a Square dye, fluorescein (FITC), tetramethylrhodamine (TRITC), Texas Red, Oregon Green, Pacific Blue, Pacific Green, and Pacific Orange.

[0173] In some cases, a detectable label is a fluorescent label selected from: an Alexa Fluor™ dye, an ATTO dye (e.g., ATTO 390, ATTO 425, ATTO 465, ATTO 488, ATTO 495, ATTO 514, ATTO 520, ATTO 532, ATTO Rho6G, ATTO 542, ATTO 550, ATTO 565, ATTO Rho3B, ATTO Rho11, ATTO Rho12, ATTO Thio12, ATTO Rho101, ATTO 590, ATTO 594, ATTO Rho13, ATTO 610, ATTO 620, ATTO Rho14, ATTO 633, ATTO 647, ATTO 647N, ATTO 655, ATTO Oxa12, ATTO 665, ATTO 680, ATTO 700, ATTO 725, ATTO 740), a DyLight dye, a cyanine dye (e.g., Cy2, Cy3, Cy3.5, Cy3b, Cy5, Cy5.5, Cy7, Cy7.5), a FluoProbes dye, a Sulfo Cy dye, a Seta dye, an IRIS Dye, a SeTau dye, an SRfluor dye, a Square dye, fluorescein (FITC), tetramethylrhodamine (TRITC), Texas Red, Oregon Green, Pacific Blue, Pacific Green, Pacific Orange, a quantum dot, and a tethered fluorescent protein.

[0174] Examples of ATTO dyes include, but are not limited to: ATTO 390, ATTO 425, ATTO 465, ATTO 488, ATTO 495, ATTO 514, ATTO 520, ATTO 532, ATTO Rho6G, ATTO 542, ATTO 550, ATTO 565, ATTO Rho3B, ATTO Rho11, ATTO Rho12, ATTO Thio12, ATTO Rho101, ATTO 590, ATTO 594, ATTO Rho13, ATTO 610, ATTO 620, ATTO Rho14, ATTO 633, ATTO 647, ATTO 647N, ATTO 655, ATTO Oxa12, ATTO 665, ATTO 680, ATTO 700, ATTO 725, and ATTO 740.

[0175] Examples of AlexaFluor dyes include, but are not limited to: Alexa Fluor™ 350, Alexa Fluor™ 405, Alexa Fluor™ 430, Alexa Fluor™ 488, Alexa Fluor™ 500, Alexa Fluor™ 514, Alexa Fluor™ 532, Alexa Fluor™ 546, Alexa Fluor™ 555, Alexa Fluor™ 568, Alexa Fluor™ 594, Alexa Fluor™ 610, Alexa Fluor™ 633, Alexa Fluor™ 635, Alexa Fluor™ 647, Alexa Fluor™ 660, Alexa Fluor™ 680, Alexa Fluor™ 700, Alexa Fluor™ 750, Alexa Fluor™ 790, and the like.

[0176] Examples of quencher moieties include, but are not limited to: a dark quencher, a Black Hole Quencher™ (BHQ™) (e.g., BHQ-0, BHQ-1, BHQ-2, BHQ-3), a Qx1 quencher, an ATTO quencher (e.g., ATTO 540Q, ATTO 580Q, and ATTO 612Q), dimethylaminoazobenzenesulfonic acid (Dabsyl), Iowa Black RQ, Iowa Black FQ, IRDye QC-1, a QSY dye (e.g., QSY 7, QSY 9, QSY 21), AbsoluteQuencher, Eclipse, and metal clusters such as gold nanoparticles, and the like.

[0177] In some cases, a quencher moiety is selected from: a dark quencher, a Black Hole Quencher™ (BHQ™) (e.g., BHQ-0, BHQ-1, BHQ-2, BHQ-3), a Qx1 quencher, an ATTO quencher (e.g., ATTO 540Q, ATTO 580Q, and ATTO 612Q), dimethylaminoazobenzenesulfonic acid (Dabsyl), Iowa Black RQ, Iowa Black FQ, IRDye QC-1, a QSY dye (e.g., QSY 7, QSY 9, QSY 21), AbsoluteQuencher, Eclipse, and a metal cluster.

[0178] Examples of an ATTO quencher include, but are not limited to: ATTO 540Q, ATTO 580Q, and ATTO 612Q. Examples of a Black Hole Quencher™. (BHQ™) include, but are not limited to: BHQ-0 (493 nm), BHQ-1 (534 nm), BHQ-2 (579 nm) and BHQ-3 (672 nm).

[0179] For examples of some detectable labels (e.g., fluorescent dyes) and/or quencher moieties, see, e.g., Bao et al., Annu Rev Biomed Eng. 2009; 11:25-47; as well as U.S. Pat. Nos. 8,822,673 and 8,586,718; U.S. patent publications 20140378330, 20140349295, 20140194611, 20130323851, 20130224871, 20110223677, 20110190486, 20110172420, 20060179585 and 20030003486; and international patent applications: WO200142505 and WO200186001, all of which are hereby incorporated by reference in their entirety.

[0180] In some cases, cleavage of a labeled detector can be detected by measuring a colorimetric read-out. For example, the liberation of a fluorophore (e.g., liberation from a FRET pair, liberation from a quencher/fluor pair, and the like) can result in a wavelength shift (and thus color shift) of a detectable signal. Thus, in some cases, cleavage of a subject labeled detector ssDNA can be detected by a color-shift. Such a shift can be expressed as a loss of an amount of signal of one color (wavelength), a gain in the amount of another color, a change in the ration of one color to another, and the like.

[0181] In some cases, signal is detected using lateral flow chromatography. In a simple sandwich type of system, the sample is applied to a pad in the lateral flow device that acts as the first stage of the absorption process, and in some cases contains a filter, to ensure the accurate and controlled flow of the sample. The conjugate pad, which stores the conjugated labels and antibodies, will receive the sample. If the target is present, the immobilized conjugated antibodies and labels will bind to the target and continue to migrate along the test. As the sample moves along the device the binding reagents situated on the nitrocellulose membrane will bind to the target at the test line. A colored line will form and the density of the line will vary depending on the quantity of the target present. Some targets may require quantification to determine target concentration. This is where a rapid test can be combined with a reader to provide quantitative results.

[0182] In some cases, the methods are carried out with a reporter molecule that is detected via lateral flow. If the primary activator is present, the system is activated and an NCR occurs. The activated Cas proteins exhibit trans cleavage of a reporter that comprises a detectable signal. The reaction mixture is loaded onto a lateral flow device, and uncleaved reporter molecule flows to the control line whereas the part of any cleaved reporter comprising the detector flows past the control to the zone comprising the capture molecule to bind to the detector. In some cases, Milenia Genline HybriDetect 1 (TwistDx™) dipsticks are used. For example, in some cases the step of measuring can include one or more of: gold nanoparticle-based detection (e.g., see Xu et al., (2017) Angew Chem Int Ed Engl.; 46(19):3468-70; and Xia et al., (2010) Proc Natl Acad Sci USA. June 15; 107(24):10837-41), fluorescence polarization, colloid phase transition/dispersion (e.g., Baksh et al., (2004) Nature. January 8; 427(6970): 139-41), electrochemical detection, semiconductor-based sensing (e.g., Rothberg et al., (2011) Nature July 20; 475(7356):348-52; e.g., one could use a phosphatase to generate a pH change after ssDNA cleavage reactions, by opening 2′-3′ cyclic phosphates, and by releasing inorganic phosphate into solution), and detection of a labeled detector ssDNA. The readout of such detection methods can be any convenient readout. Examples of possible readouts include but are not limited to: a measured amount of detectable fluorescent signal; a visual analysis of bands on a gel (e.g., bands that represent cleaved product versus uncleaved substrate), a visual or sensor-based detection of the presence or absence of a color (i.e., color detection method), and the presence or absence of (or a particular amount of) an electrical signal.

[0183] In some cases, the detectable signal that is measured is produced by the fluorescence-emitting dye pair. For example, in some cases, a subject method includes contacting a sample with a labeled detector ssDNA comprising a fluorescence resonance energy transfer (FRET) pair or a quencher/fluor pair, or both.

[0184] In some cases, a subject method includes contacting a sample with a labeled detector ssDNA comprising a FRET pair. In some cases, a subject method includes contacting a sample with a labeled detector ssDNA comprising a fluor/quencher pair. Fluorescence-emitting dye pairs comprise a FRET pair or a quencher/fluor pair. In both cases of a FRET pair and a quencher/fluor pair, the emission spectrum of one of the dyes overlaps a region of the absorption spectrum of the other dye in the pair. As used herein, the term “fluorescence-emitting dye pair” is a generic term used to encompass both a “fluorescence resonance energy transfer (FRET) pair” and a “quencher/fluor pair,” both of which terms are discussed in more detail below. The term “fluorescence-emitting dye pair” is used interchangeably with the phrase “a FRET pair and/or a quencher/fluor pair.” In some cases (e.g., when the detector ssDNA includes a FRET pair) the labeled detector ssDNA produces an amount of detectable signal prior to being cleaved, and the amount of detectable signal that is measured is reduced when the labeled detector ssDNA is cleaved. In some cases, the labeled detector ssDNA produces a first detectable signal prior to being cleaved (e.g., from a FRET pair) and a second detectable signal when the labeled detector ssDNA is cleaved (e.g., from a quencher/fluor pair). As such, in some cases, the labeled detector ssDNA comprises a FRET pair and a quencher/fluor pair. In some cases, the labeled detector ssDNA comprises a FRET pair. FRET is a process by which radiationless transfer of energy occurs from an excited state fluorophore to a second chromophore in close proximity. The range over which the energy transfer can take place is limited to approximately 10 nanometers (100 angstroms), and the efficiency of transfer is extremely sensitive to the separation distance between fluorophores. Thus, as used herein, the term “FRET” (“fluorescence resonance energy transfer”; also known as “Forster resonance energy transfer”) refers to a physical phenomenon involving a donor fluorophore and a matching acceptor fluorophore selected so that the emission spectrum of the donor overlaps the excitation spectrum of the acceptor, and further selected so that when donor and acceptor are in close proximity (usually 10 nm or less) to one another, excitation of the donor will cause excitation of and emission from the acceptor, as some of the energy passes from donor to acceptor via a quantum coupling effect. Thus, a FRET signal serves as a proximity gauge of the donor and acceptor; only when they are in close proximity to one another is a signal generated. The FRET donor moiety (e.g., donor fluorophore) and FRET acceptor moiety (e.g., acceptor fluorophore) are collectively referred to herein as a “FRET pair”. The donor-acceptor pair (a FRET donor moiety and a FRET acceptor moiety) is referred to herein as a “FRET pair” or a “signal FRET pair.” Thus, in some cases, a subject labeled detector ssDNA includes two signal partners (a signal pair), when one signal partner is a FRET donor moiety and the other signal partner is a FRET acceptor moiety. A subject labeled detector ssDNA that includes such a FRET pair (a FRET donor moiety and a FRET acceptor moiety) will thus exhibit a detectable signal (a FRET signal) when the signal partners are in close proximity (e.g., while on the same RNA molecule), but the signal will be reduced (or absent) when the partners are separated. FRET donor and acceptor moieties (FRET pairs) will be known to one of ordinary skill in the art and any convenient FRET pair (e.g., any convenient donor and acceptor moiety pair) can be used. See: Bajar et al. (2016) Sensors (Basel). September 14; 16(9); and Abraham et al. (2015) PLoS One. August 3; 10(8):e0134436.

### Nucleic Acid Signal Amplifier

[0185] Any nucleic acid amplifier activator (also referred to as an “RNA-amplifier” (if RNA), “activator” or a “substrate”) may be used in the NCR compositions, systems and methods described herein. Prior to the detection by Cas12 or Cas13 of a target nucleic acid (e.g., a coronavirus viral sequence), the activator of the systems described herein is not capable of binding to (activating the signal amplifier), for example, it is caged such that it cannot hybridize to (or activate) the signal amplifier. However, upon the activation of the target sensor in the presence of target sequence to be detected, the amplifier substrate is released and becomes available to hybridize to (and activate) the signal amplifier. Thus, the released substrate activates the signal amplifier and unleashes a second cascade of Cas enzyme activity to generate more detectable label, thereby generating an exponential signal in the same reaction.

[0186] Thus, the activator substrate comprises any sequence which activates the signal amplifier to become a non-specific nuclease capable of cleaving the reporter complex and releasing the detectable label. Non-limiting examples of suitable sequences include guide RNAs or their cognate activator nucleic acids (e.g., RNA in the case of Cas13, and DNA in the case of Cas12).

[0187] Any of the nucleotide sequences described herein may comprise one or more modifications, e.g., a base modification, a backbone modification, a sugar modification, etc., to provide the nucleic acid with a new or enhanced feature (e.g., improved stability). As is known in the art, a nucleoside is a base-sugar combination. The base portion of the nucleoside is normally a heterocyclic base. The two most common classes of such heterocyclic bases are the purines and the pyrimidines. Nucleotides are nucleosides that further include a phosphate group covalently linked to the sugar portion of the nucleoside. For those nucleosides that include a pentofuranosyl sugar, the phosphate group can be linked to the 2′, the 3′, or the 5′ hydroxyl moiety of the sugar. In forming oligonucleotides, the phosphate groups covalently link adjacent nucleosides to one another to form a linear polymeric compound. In turn, the respective ends of this linear polymeric compound can be further joined to form a circular compound, however, linear compounds are generally suitable. In addition, linear compounds may have internal nucleotide base complementarity and may therefore fold in a manner as to produce a fully or partially double-stranded compound. Within oligonucleotides, the phosphate groups are commonly referred to as forming the internucleoside backbone of the oligonucleotide. The normal linkage or backbone of RNA and DNA is a 3′ to 5′ phosphodiester linkage. Additional nucleotide modifications, including modifications of backbones, internucleoside linkages, the use of mimetics, the use of locked nucleic acids (LNAs), and/or base modifications of substitutions such as the inclusion of one or more nucleobases are described in U.S. Publication No. 20190241954.

[0188] One or more of the nucleic acids described herein may also include one or more substituted sugar moieties.

[0189] One or more RNA amplifiers may be included in the reporter molecule, for example as part of the sequence linking the detectable label and quenching moiety of the reporter complex and/or distal to one or both of the detectable label and/or quencher. In some cases, one or more amplifier activators are included between the detectable label and quencher. Alternatively, and or in addition to embodiments in which the reporter molecule comprises trigger substrate sequences, the triggers may be a separate component in the compositions, systems and methods described herein.

[0190] The amplifier activators may include poly U or poly A sequences to allow for selective cleavage. Cas13 enzymes produce cleaved RNA fragments with 2′,3′-cyclic phosphates, and a subset of them prefer to cleave at U. Thus, by using a substrate with the sequence, A₄-Uₙ, Cas13 generates A₄>P that activates the ribonuclease (RNase) activity of TtCsm6. Sequences with A₅-Uₙ and A₆-Uₙ have previously been used to couple Csm6 to Cas13 (Gootenberg et al. (2017) Science 356(6336):438-442), but these do not produce optimal activation of Csm6 enzymes which recognize A₄, like TtCsm6. In addition, no Csm6 enzyme has been demonstrated to work in a feed-forward loop that provide higher detection speed and sensitivity than existing nucleic acid detection methods.

[0191] In some embodiments, the guide RNAs and/or activator RNAs may be modified to allow conditional interaction with a Cas protein, such that interaction only occurs in the optimal time frame such as after detection of a target nucleic acid. There are many different mechanisms to enable conditional interaction including using cleavable antisense-DNA as a protector for gRNA activity (Jain et al, (2016) Angew Chem Int Ed Engl 55 (40) 12440-4); ligand-dependent RNA cleavage and deprotection (Ferry et al (2017) Nat Commun 8:14633) ligand-dependent recruitment of transcriptional activators to dCas (Maji et al (2017) Nat Chem Biol 13 (1):9-11) and small molecule-induced reassembly of the Cas:guide RNP complex (Kunert et al (2019) Nat Commun. 10(1):2127) and photocaged gRNA designs for the direct regulation of the interaction between RNP and dsDNA using light (Zhou et al (2020) Angew Chem Int Ed Engl doi: 10.1002/anie.201914575). Another approach relies on the unique cleavage preferences of different Cas enzymes. In some embodiments, activators are not perfect anti-sense matches to their cognate guide RNAs. In some embodiments, non-matching nucleotides are used to de-tune the interaction with the guide to make it less sensitive, and less likely to result in non-specific signal. In some embodiments, the non-matching nucleotides are introduced into ‘wobble’ positions within the complementary region.

[0192] In some embodiments, activator molecules comprise both RNA and DNA sequences.

[0193] In some cases, the activator RNA molecules are caged. Caging may be accomplished by any physical or chemical means. For example, the triggers may be caged using 5′ and 3′ sequence extensions that can modulate critical features for Cas enzyme binding or cleavage. In this regard, the selectivity of Cas12 and Cas13 non-specific nuclease activity can be exploited for single-stranded nucleic acids by employing sequence extensions that can base-pair with the direct repeat of the guide RNA, the guide RNA spacer, the seed sequence (the sequence within the guide RNA known to be sensitive to mismatch with the activating sequence, see Abudayyeh et al (2016) Science 353: aaf5573) within the guide RNA spacer, and/or the cognate of the seed sequence in the activator nucleic acid. Such caging sequences may be linear or may be in loop or other formations. These 5′ and 3′ sequence extensions can be combined on the same caged substrate. Different combinations of sequence extensions can be used across the guide RNA and activator nucleic acid pair.

[0194] In some cases, the substrate cage can also be a separate molecule that base pairs with the guide RNA or activator. This cage can be released via endonuclease or exonuclease activity, such as Xrn1 or Csm6. In some embodiments, the cage can contain chemical modifications such as locked nucleic acid (LNA) moieties or 2′-OMe RNA as described herein. See, also, U.S. Publication No. 20190241954.

[0195] The substrates may be activated (uncaged) in any way. In some cases, the caging sequences (e.g., exposed loop regions) in the sequence extensions are designed to be specifically cleavable by distinct subtypes of the Cas protein (Cas13 or Cas12) causing the release of the cage and production of a functional guide RNA or activator. Profiling cleavage preferences of Cas12 and Cas13 proteins on homopolymer reporter substrates demonstrated that most orthologs preferred either uridine, a combination of bases, or adenine (East-Seletsky (2017) Mol Cell 66(3); 373-383; Gootenberg et al (2018) Science 360(6387): 439-444). For example, LmaCas13a, LbuCas13a and PprCas13a exhibited a strong preference for polyU while CcaCas13b exhibited a medium preference for polyU. Pin2Cas13b demonstrated a medium preference for polyU and for polyC. PbuCas13b and PguCas13b both showed a slight preference for poly U while LbaCas13a has a strong preference for polyA. Finally, BzoCas13b demonstrated a slight preference for polyU and polyA. Furthermore, some of the Cas13 orthologs tested showed differential activity dependent on ion concentration and/or guide RNA length. Thus, a cage structure may be added to a guide RNA such that when intact, the cage prevents the guide from interacting with its cognate target. When the cage is released, for example following trans cleavage by a Cas13a complex, the guide is free to interact with target, causing activation of the RNP complex. In some embodiments, the activator nucleic acid is a DNA wherein the DNA sequence comprises an RNA cage. In some embodiments, RNA and DNA activator nucleic acids are used, e.g. when using secondary amplifier complexes with Cas13 and Cas12 RNP complex amplifiers. The activated RNP complexes then cleave more caged substrates. Each additional activated Cas complex can activate more caged substrates, in addition to producing a fluorescent signal, leading to a feed-forward cycle of Cas-directed nuclease activity. As the reaction progresses, these enzymes are capable of cleaving still more detectable label, leading to an exponential amplification of signal.

[0196] In some embodiments, Csm6 is used to further amplify the detection reaction. In this system, protected guide RNA amplifiers comprising a poly-A stretch followed by a protecting poly-U stretch that could be cleaved by a uracil preferring Cas13 enzyme, such that the Cas13 would degrade all the uridines down to the homopolymeric A stretch in the guide. In some embodiments, a protected Csm6 activator RNA is used, comprising for example, a poly-A stretch followed by a protecting poly-U stretch that could be cleaved by a uracil preferring Cas13 enzyme, such that the Cas13 would degrade all the uridines down to the homopolymeric A stretch in guide. Protected guide RNA amplifiers and protected activator RNAs will have 2′3′ cyclic phosphates following Cas13 cleavage and thus will activate Csm6. (A)₆ polynucleotides are known to activate Csm6, and both EiCsm6 and LsCsm6 were shown to amplify the detection signal following the initial binding of the target nucleic acid (Gootenberg et al (2018) Science 360(6387): 439-444).

[0197] Csm6 can also be used as the second enzyme that is activated by Cas13 to start a feed-forward loop. A caged activator for Csm6 would include four, five or six adenosines (A4, A5 or A6) at the 5′ end of the sequence that may be modified to prevent premature cleavage (e.g. 2′-OMe, 2′-H, 2′-F) by either itself or Cas13. It would also have additional cleavable A's or U's at its 3′ end that cage the substrate. Uncaging would be accomplished by trimming away the 3′ RNA nucleotides to generate either A4>P, A5>P or A6>P by Cas13 to activate Csm6. The identity of the 3′-nucleotides used to cage the substrate can vary, depending on the nucleotide preference of the Cas enzyme used for uncaging. For example, one potential substrate could be 5′-fA-fA-fA-AAAAAAA-3′(SEQ ID NO:1), in which three fA nucleotides have the 2′-F modification, and the 5 terminal A's could be cleaved off by either Csm6 or LbaCas13.

[0198] In one embodiment of NCR amplification with Csm6, a Cas enzyme, LbaCas13, would sense complementary RNA, and become activated for trans RNA cleavage. It would then trim away adenosines at the 3′ end of the caged Csm6 activator, leaving a modified A4>P, A5>P or A6>P that would bind to and activate a Csm6 enzyme. The activated Csm6 would then uncage additional caged activators, which would then lead to further activation of Csm6 molecules, triggering a feed-forward loop following the initial detection. The activated Csm6 molecules would also cleave the fluorescent reporter substrate, leading to a detectable signal. This strategy is different from previous uses of Csm6 with Cas13 (Gootenberg et al., 2018, Science, ibid), since the modified substrate enables a feed-forward loop with Csm6 that provides greater sensitivity.

[0199] This strategy can also be adapted to amplify primary RNA detection by U-cleaving Cas13 orthologs as well, by caging the activator with U's, instead of A's, at its 3′ end (e.g. 5′-AAAAUUUUUU-3′, SEQ ID NO:2). For example, LbuCas13 would cleave an A4-U6 caged activator to generate an A4>P. This uncaged substrate would activate TtCsm6, which would then uncage a second activator (e.g. 5′-fA-fA-fA-AAAAAAA-3′, SEQ ID NO:1) as well as cleave the reporter. This would initiate a feed-forward loop that amplifies the primary detection event. Modification of the 2′-OH of nucleotides comprising the activator sequence would be used to prevent degradation of the activator by Csm6.

[0200] Various versions of the activator may be tested, including non-modified versions or different numbers or sequences of caging nucleotides following the A4, A5 or A6 activator sequence. All approaches described could potentially apply to any Csm6 or Csx1 enzyme. This strategy could also be used to multiplex with other NCR pathways involving Cas13 or Cas12 to detect multiple RNA targets simultaneously, based on differences in the cleavage preference of the Cas enzymes.

[0201] In some embodiments, a Csm6 activator sequence is included within a cage sequence, for example, on a guide RNA (FIG. 1I, top). Upon trans cleavage of the sequences on either side of the Csm6 activator sequence by Cas13 (e.g. LbuCas13a) that has been activated by its interaction with the primary activator RNA, the Csm6 sequence is released and able to interact with and activate Csm6. The activated Csm6 then is able to act on the caged guide RNA, making more available to complex with a Cas13 enzyme and then the primary activator to continue more detection of the primary activator. At the same time, the activated Csm6 also will cleave the reporter molecule and amplify the signal. In some embodiments, a caged activator RNA is used comprising the Csm6 activator sequence such that following cleavage by the activated Csm6, the uncaged RNA can interact with a Cas12-based amplification system. In some embodiments, both a caged guide comprising a Csm6 activator and a caged activator RNA comprising a Csm6 activator is used. All signal that is detected is dependent upon the initial interaction of the Cas13 with the primary activator.

[0202] In some embodiments, a protected Csm6-specific activator RNA is included in the system (FIG. 1I, bottom). In this embodiment, the protected Csm6 activator is protected by nucleotides that are trimmed by Cas13 that has been activated through its interaction with the primary activator. The trimmed Csm6-specific activator RNA can now interact with and activate the Csm6 enzyme which can now act on molecules such as caged guide RNAs, caged activator RNAs and RNA reporter molecules to amplify the detection such that detection is dependent upon initial interaction of the Cas13 with the primary activator.

[0203] In some embodiments, a protected Csm6-specific activator RNA is included in the system (FIG. 1J, top) and the Csm6 amplification serves as the sole amplifier (e.g. no additional Cas12 amplification step). In this embodiment, a protected Csm6-specific activator RNA is included in the system, where the protection comprises the use of poly A sequences where some of the As at the 5′ end of the Csm6-specific activator comprise a 2′-F (fluorine). Cas13 enzymes likely use a classic metal-independent cleavage mechanism, and thus are not able to cleave As comprising the 2′-F (Gootenberg et al., (2018) ibid; Yang, W. (2011) Q. Rev. Biophys. 44, 1-93). The Cas13 that has been activated by its interaction with the primary activator then trims all the A nucleotides that comprise a 2′-OH except the As immediately 3′ to the stretch of As comprising 2′F. This resultant trimmed sequence will have the 2′3′ cyclic phosphate required for activation of Csm6. The activated Csm6 can now act on molecules such as caged guide RNAs and reporter molecules to amplify the detection such that detection is dependent upon initial interaction of the Cas13 with the primary activator. In some embodiments, the Csm6-specific activator RNA comprising the 5′ As with 2′-F is used in systems comprising a secondary Cas12 amplification system.

[0204] In some embodiments, the activation of Csm6 is accomplished through the use of long polyA RNAs (FIG. 1J, bottom). In this embodiment, activation of Csm6 following Cas13 cleavage of long polyA RNAs. These long polyA molecules are supplied in the reaction and cleaved by Cas13 that has been activated following interaction with the primary activator RNA such that Cas13's trans cleavage activity is active. The polyA RNAs will be cleaved at random lengths and will have 2′3′ cyclic phosphates on the 3′ end of the lengths. Some of those lengths will be the correct size (e.g. A4>P, A5>P or A6>P) to activate Csm6. The activated Csm6 enzyme can now act on molecules such as caged guide RNAs, caged activator RNAs and reporter molecules to amplify the detection such that detection is dependent upon initial interaction of the Cas13 with the primary activator. In some embodiments, a Csm6-specific protected activator as discussed above is also included such that once the correct length of polyA has stimulated Csm6, the activated Csm6 could then release a protected Csm6-specific activator RNA (described above) resulting in an amplification of signal.

[0205] In some cases, for example when using Cas13, the anti-tag sequence is included in the activator RNA, such as in the cleavable loop on the 3′ end, to suppress background nuclease activity if Cas enzymes become activated without cleavage of the cage.

[0206] Signals generated from orthogonal targeting systems, such as Cas12 and Cas13, or distinct subfamilies of U-specific and A-specific cleaving Cas13 may be combined for signal transduction cascades. Logic gates, in which multiple distinct sequences need to be detected for amplification, can also be incorporated. Distinct Cas enzymes can also exhibit different nucleotide motif preferences, such as dinucleotide motifs, which can be incorporated for multiplexed signal readout.

[0207] In some cases, the activity of a Cas enzyme may be dampened, for example in order to lower background signal (which may lead to a false positive amplification). This may be accomplished by any suitable means, for example via the use of mutations that lower enzyme activity. Suitable mutations can be experimentally obtained using known techniques, may be commercially obtained or identified from the literature.

[0208] Loop Mediated Isothermal Amplification (LAMP) methodologies and/or nucleic acid amplification may also be employed. See, e.g., Gadkar et al. (2018) Scientific Methods 8:5548; Notomi et al. (2006) Nucleic Acids Research 28(12):e63; Piepenburg et al. (2000) PLoS Biology 4(7):1115-1121. LAMP is a simple and accurate isothermal nucleic acid amplification technique that has found wide spread use in laboratory and point of care settings (Gadkar et al (2018) Sci Reports 8 (5548)). The technique is carried out at a single temperature (60-65° C.) and is capable of producing approximately 50 times the amount of amplified product in a short amount of time (15 minutes). LAMP typically utilizes four primers (FIP (forward inner primer), BIP (backward inner primer), F3 (forward primer) and B3 (backward primer) to recognize six different regions of the target sequences. LAMP may be combined with a reverse transcriptase step for detecting RNA molecules (see Shen (2020) J Pharm Anal 10(2):97).

[0209] In some cases, the mismatch tolerant LAMP technique is used. Mismatch tolerant LAMP comprises the addition of a high-fidelity DNA polymerase to the reaction mixture which removes mismatches at the 3′ end of the LAMP primers during amplification. Use of mismatch tolerant LAMP may be helpful when amplifying sequences from genetically diverse viral strains (Zhou et al (2019) Front Micro 10, art 1056).

[0210] Nucleic Acid Sequenced Based Amplification and Transcription Mediated Amplification (NASBA and TMA, respectively), are similar isothermal amplification techniques that proceed through RNA and may be used. NASBA utilizes two RNA target-specific primers and three enzymes (i.e., avian myeloblastosis virus reverse transcriptase, T7 DNA-dependent RNA polymerase (DdRp) and RNase H). The standard NASBA protocol for RNA amplification requires a 65° C. RNA incubation step to denature the target prior to the addition of enzymes. In the initiation phase, a specific forward primer (P1), that possesses a 5′ sequence corresponding to the promoter of the T7 DdRp, hybridizes to any target RNA present in the sample and is extended by the reverse transcriptase. Subsequently, the RNA portion of the resulting RNA:DNA heteroduplex is degraded by RNase H, while a specific reverse primer (P2) hybridizes to the complementary sequence and is extended by the reverse transcriptase, leading to the formation of a dsDNA with the target sequence and a T7 promoter. Then, the T7 DdRp produces many RNA molecules that are complementary to the original target RNA. In the amplification phase, each newly synthesized RNA can be copied, resulting in an exponential amplification of RNA complimentary to the target.

[0211] Primers are designed to target a region of interest, but importantly, one primer includes the promoter sequence for T7 RNA polymerase at the 5′ end. This enables production of single-stranded RNA species, which are reverse transcribed to cDNA by a reverse transcriptase included in the reaction. The RNA in the DNA-RNA hybrids is destroyed by RNase H activity (from an exogenous protein in NASBA, or by an RNase H+ RT in TMA) and dsDNA is produced by the RT. This template then gets transcribed to RNA by T7 RNAP and exponential amplification results (Compton (1991) Nature. 350 (6313): 91-2; U.S. Pat. No. 5,480,784).

[0212] Strand Displacement Amplification (SDA) or Nicking Enzyme Amplification Reaction (NEAR) are two similar approaches that can be used for DNA amplification and may be used with the methods and compositions of the invention. Both techniques rely on a strand-displacing DNA polymerase, typically Bst DNA Polymerase, Large Fragment or Klenow Fragment (3′-5′ exo-), to initiate at nicks created by a strand-limited restriction endonuclease or nicking enzyme at a site contained in a primer. The nicking site is regenerated with each polymerase displacement step, resulting in exponential amplification. NEAR is extremely rapid and sensitive, enabling detection of small target amounts in minutes (Van Ness et al (2003) Proc Natl Acad Sci USA 100(8):4504-9). SDA and NEAR are typically utilized in clinical and biosafety applications.

[0213] In some cases, Helicase-dependent amplification (HDA) is used. HDA exploits the activity of a DNA helicase to separate complementary strands of double strand (ds) DNAs thus avoiding the temperature cycling to produce single-stranded templates for primer hybridization and subsequent primer extension by a DNA polymerase. It mimics the replication fork and enables DNA synthesis in the presence of ATP when it loads on to the dsDNA template and traverses along the target DNA, disrupting the hydrogen bonds linking the two strands. Two sequence-specific primers hybridize to the 3′-end of each ssDNA template and DNA polymerases extend primers annealed to the target by producing dsDNA. The two newly synthesized dsDNA products act then as substrates for DNA helicases in the next round of the reaction, resulting in an exponential amplification of the selected target sequence (Jeong, Y-J. et al; (2009) Cell. Mol. Life Sci. 66, 3325-3336).

[0214] Recombinase polymerase amplification (RPA) is the isothermal amplification of specific DNA fragments achieved by the binding of opposing oligonucleotide primers to template or target DNA and their extension by a DNA polymerase. Global melting of the amplification template is not required for the primers to be directed to their complementary target sequences. Instead, RPA employs recombinase-primer complexes to scan the double-stranded DNA and facilitate strand exchange at cognate sites. The resulting structures are stabilized by single-stranded DNA binding proteins interacting with the displaced template strand, thus preventing the ejection of the primer by branch migration. Recombinase disassembly leaves the 3′ end of the oligonucleotide accessible to a strand displacing DNA polymerase, in this case the large fragment of Bacillus subtilis Pol I (Bsu), and primer extension ensues. Exponential amplification is accomplished by the cyclic repetition of this process. Thus, in some embodiments, a preamplification of the target nucleic acid may be performed using LAMP, RPA or other isothermal amplification techniques including strand displacement amplification (SDA, Walker et al (1992) PNAS USA 89:392-396) and helicase-dependent amplification (Vincent et al (2004) EMBO Rep 5: 795-800).

[0215] Amplification techniques may be performed in microfluidic devices (Zanoli and Spoto (2013) Biosensors 3(1), 18-43).

[0216] In some embodiments, the system detection utilizes multiplexed guide RNAs to detect a target primary activator. Multiple guides that recognize different sections of a target nucleic acid primary activator may be used. In some embodiments, multiplexing can be done to recognize different target primary activators. Different Cas orthologs, Csm6 or Csx1 enzymes that cleave different nucleic acid substrates and/or multiplexed guides may be used with different fluorophore-quencher reporters for detection. This would allow identification of one or more primary activators in a single reaction. In some cases, the system is designed to detect multiple primary activators such that the presence or absence of multiple targets can be assayed. For example, one Cas/fluorophore combination may be used to detect one type of virus (e.g. influenza) while another may detect another type of virus (e.g. coronavirus), or the system may be used to detect the presence of a virus (e.g. coronavirus) as well as any co-infecting pathogens such as influenza A and B, respiratory syncytial virus (RSV), non-COVID-19 coronaviruses, adenovirus, parainfluenza 1 through 4, human metapneumovirus, rhinovirus/enterovirus, Chlamydia pneumoniae, and Mycoplasma pneumoniae (Kim et al (2020) JAMA doi:10.1001/jama.2020.6266).

### Target (Primary Activator) Sequences

[0217] The source of the primary target sequence can be any source, including mammals, viruses, bacteria, and fungi. In some embodiments, the target sequence is a microbial or viral sequence, for example a coronavirus sequence such as COVID-19. In still other embodiments the target sequence is a mammalian genomic or transcribed sequence. In some embodiments, the source may be a human, non-human, or animal. In some embodiments, an animal source may be a domesticated or non-domestic animal, for example wild game. In some embodiments, the domesticated animal is a service or companion animal (e.g. a dog, cat, bird, fish, or reptile), or a domesticated farm animal.

[0218] For primary target sequences from pathogenic sources, the pathogen may have significant public health relevance, such as bacteria, fungus, or protozoan, and the target sequence may be found, without limitation, in one or more of coronavirus (e.g., severe acute respiratory syndrome-related coronavirus (SARS), Middle East respiratory syndrome-related coronavirus (MERS), COVID-19, etc.), Hepatitis C virus, Japanese Encephalitis, Dengue fever, or Zika virus. Any pathogen (e.g., virus, bacteria, etc.) can be detected.

[0219] A primary target sequence can be single stranded (ss) or double stranded (ds) DNA or RNA (e.g., viral RNA, mRNA, tRNA, rRNA, iRNA, miRNA, etc.). When the target sequence is single stranded, there is no preference or requirement for a PAM sequence in the target. However, when the target DNA is dsDNA, a PAM is usually present adjacent to the target sequence of the target DNA (e.g., see discussion of the PAM elsewhere herein). The source of the target DNA can be the same as the source of the sample, e.g., as described below.

[0220] In some cases, the primary target sequence is a viral sequence (e.g., a genomic RNA of an RNA virus or DNA of a DNA virus). As such, subject method can be for detecting the presence of a viral sequence amongst a population of nucleic acids (e.g., in a sample).

[0221] Non-limiting examples of possible primary RNA targets include viral RNAs such as coronavirus (SARS, MERS, SARS-CoV-2), Orthomyxoviruses, Hepatitis C Virus (HCV), Ebola disease, influenza, polio measles and retrovirus including adult Human T-cell lymphotropic virus type 1 (HTLV-1) and human immunodeficiency virus (HIV).

[0222] Non-limiting examples of possible target DNAs include, but are not limited to, viral DNAs such as: a papovavirus (e.g., human papillomavirus (HPV), polyomavirus); a hepadnavirus (e.g., Hepatitis B Virus (HBV)); a herpesvirus (e.g., herpes simplex virus (HSV), varicella zoster virus (VZV), epstein-barr virus (EBV), cytomegalovirus (CMV), herpes lymphotropic virus, Pityriasis Rosea, kaposi's sarcoma-associated herpesvirus); an adenovirus (e.g., atadenovirus, aviadenovirus, ichtadenovirus, mastadenovirus, siadenovirus); a poxvirus (e.g., smallpox, vaccinia virus, cowpox virus, monkeypox virus, orf virus, pseudocowpox, bovine papular stomatitis virus; tanapox virus, yaba monkey tumor virus; molluscum contagiosum virus (MCV)); a parvovirus (e.g., adeno-associated virus (AAV), Parvovirus B19, human bocavirus, bufavirus, human parv4 G1); Geminiviridae; Nanoviridae; Phycodnaviridae; and the like. In some cases, the target DNA is parasite DNA. In some cases, the target DNA is bacterial DNA, e.g., DNA of a pathogenic bacterium.

[0223] In some embodiments, the target nucleic acid is a DNA or RNA sequence associated with cancer. These can include genes that play a role in DNA methylation, histone modification, message splicing, and microRNA expression. Along with well known examples such as the so-called Philadelphia chromosome associated with chronic myeloid leukemia, in some embodiments, the target is a DNA associated with a translocation such as t(8;14)(q24;q32), t(2;8)(p12;q24), t(8;22)(q24;q11), t(8;14)(q24;q11), and t(8;12)(q24;q22), each associated with an alteration of C-Myc and associated with acute lymphocytic leukemia. Other examples include t(10;14)(q24;q32) which effects the LYT10 gene and is associated with B cell lymphoma (see Nambiar (2008) Biochim Biophys Acta 1786: 139-152). Other targets include mutant genes associated with cancers such as BRCA2 (ovarian cancer), BMP2, 3, 4, 7 (endometrial cancer), CAGE (cervical cancer), HOXA10 (ovarian cancer) and more (see Jeong et al (2014) Front Oncol 4(12)).

[0224] In some cases, the methods and compositions of the invention are used to examine other disorders that display an altered transcriptional state. Examples include diabetes, metabolic syndrome (Hawkins et al (2018) Peer J 6; e5062), Huntington syndrome and other neurological diseases (Xiang et al, (2018) Front Mol Neurosci 11:153) and cancer. In some cases, the methods and compositions are used to monitor response to a therapy administered for the treatment of a disorder characterized by an altered transcriptional state. In some cases, the methods and compositions are used to monitor altered transcriptional activity in a non-disease condition such as the onset of puberty, pregnancy or menopause.

### Samples

[0225] Any sample that includes nucleic acid (e.g., a plurality of nucleic acids) can be used in the compositions, systems and methods described herein. The term “plurality” is used herein to mean two or more. Thus, in some cases a sample includes two or more (e.g., 3 or more, 5 or more, 10 or more, 20 or more, 50 or more, 100 or more, 500 or more, 1,000 or more, or 5,000 or more) nucleic acids (e.g., RNAs or DNAs). A subject method can be used as a very sensitive way to detect a target sequence present in a sample (e.g., in a complex mixture of nucleic acids such as RNAs or DNAs). In some cases, the sample includes 5 or more RNAs or DNAs (e.g., 10 or more, 20 or more, 50 or more, 100 or more, 500 or more, 1,000 or more, or 5,000 or more RNAs or DNAs) that differ from one another in sequence. In some cases, the sample includes 10 or more, 20 or more, 50 or more, 100 or more, 500 or more, 10³ or more, 5×10³ or more, 10⁴ or more, 5×10⁴ or more, 10⁵ or more, 5×10⁵ or more, 10⁶ or more 5×10⁶ or more, or 10⁷ or more, RNAs or DNAs. In some cases, the sample comprises from 10 to 20, from 20 to 50, from 50 to 100, from 100 to 500, from 500 to 10³, from 10³ to 5×10³, from 5×10³ to 10⁴, from 10⁴ to 5×10⁴, from 5×10⁴ to 10⁵, from 10⁵ to 5×10⁵, from 5×10⁵ to 10⁶, from 10⁶ to 5×10⁶, or from 5×10⁶ to 10⁷, or more than 10⁷, RNAs or DNAs. In some cases, the sample comprises from 5 to 10⁷ RNAs or DNAs (e.g., that differ from one another in sequence)(e.g., from 5 to 10⁶, from 5 to 10⁵, from 5 to 50,000, from 5 to 30,000, from 10 to 10⁶, from 10 to 10.sup.5, from 10 to 50,000, from 10 to 30,000, from 20 to 10⁶, from 20 to 10⁵, from 20 to 50,000, or from 20 to 30,000 RNAs or DNAs). In some cases, the sample includes 20 or more RNAs or DNAs that differ from one another in sequence. In some cases, the sample includes RNAs or DNAs from a cell lysate (e.g., a eukaryotic cell lysate, a mammalian cell lysate, a human cell lysate, a prokaryotic cell lysate, a plant cell lysate, and the like). For example, in some cases the sample includes RNA or DNA from a cell such as a eukaryotic cell, e.g., a mammalian cell such as a human cell.

[0226] Suitable samples include but are not limited to saliva, blood, serum, plasma, urine, aspirate, and biopsy samples. Thus, the term “sample” with respect to a patient encompasses blood and other liquid samples of biological origin, solid tissue samples such as a biopsy specimen or tissue cultures or cells derived therefrom and the progeny thereof. The definition also includes samples that have been manipulated in any way after their procurement, such as by treatment with reagents; washed; or enrichment for certain cell populations, such as cancer cells. The definition also includes sample that have been enriched for particular types of molecules, e.g., DNAs. The term “sample” encompasses biological samples such as a clinical sample such as blood, plasma, serum, aspirate, cerebral spinal fluid (CSF), and also includes tissue obtained by surgical resection, tissue obtained by biopsy, cells in culture, cell supernatants, cell lysates, tissue samples, organs, bone marrow, and the like. A “biological sample” includes biological fluids derived therefrom (e.g., cancerous cell, infected cell, etc.), e.g., a sample comprising DNAs that is obtained from such cells (e.g., a cell lysate or other cell extract comprising DNAs).

[0227] A sample can comprise, or can be obtained from, any of a variety of cells, tissues, organs, or acellular fluids. Suitable sample sources include eukaryotic cells, bacterial cells, and archaeal cells. Suitable sample sources include single-celled organisms and multi-cellular organisms. Suitable sample sources include single-cell eukaryotic organisms; a plant or a plant cell; an algal cell, e.g., Botryococcus braunii, Chlamydomonas reinhardtii, Nannochloropsis gaditana, Chlorella pyrenoidosa, Sargassum patens, C. agardh, and the like; a fungal cell (e.g., a yeast cell); an animal cell, tissue, or organ; a cell, tissue, or organ from an invertebrate animal (e.g. fruit fly, cnidarian, echinoderm, nematode, an insect, an arachnid, etc.); a cell, tissue, fluid, or organ from a vertebrate animal (e.g., fish, amphibian, reptile, bird, mammal); a cell, tissue, fluid, or organ from a mammal (e.g., a human; a non-human primate; an ungulate; a feline; a bovine; an ovine; a caprine; etc.). Suitable sample sources include nematodes, protozoans, and the like. Suitable sample sources include parasites such as helminths, malarial parasites, etc.

[0228] Suitable sample sources include a cell, tissue, or organism of any of the six kingdoms, e.g., Bacteria (e.g., Eubacteria); Archaebacteria; Protista; Fungi; Plantae; and Animalia. Suitable sample sources include plant-like members of the kingdom Protista, including, but not limited to, algae (e.g., green algae, red algae, glaucophytes, cyanobacteria); fungus-like members of Protista, e.g., slime molds, water molds, etc; animal-like members of Protista, e.g., flagellates (e.g., Euglena), amoeboids (e.g., amoeba), sporozoans (e.g., Apicomplexa, Myxozoa, Microsporidia), and ciliates (e.g., Paramecium). Suitable sample sources include members of the kingdom Fungi, including, but not limited to, members of any of the phyla: Basidiomycota (club fungi; e.g., members of Agaricus, Amanita, Boletus, Cantherellus, etc.); Ascomycota (sac fungi, including, e.g., Saccharomyces); Mycophycophyta (lichens); Zygomycota (conjugation fungi); and Deuteromycota. Suitable sample sources include members of the kingdom Plantae, including, but not limited to, members of any of the following divisions: Bryophyta (e.g., mosses), Anthocerotophyta (e.g., hornworts), Hepaticophyta (e.g., liverworts), Lycophyta (e.g., club mosses), Sphenophyta (e.g., horsetails), Psilophyta (e.g., whisk ferns), Ophioglossophyta, Pterophyta (e.g., ferns), Cycadophyta, Gingkophyta, Pinophyta, Gnetophyta, and Magnoliophyta (e.g., flowering plants).

[0229] Suitable sample sources include members of the kingdom Animalia, including, but not limited to, members of any of the following phyla: Porifera (sponges); Placozoa; Orthonectida (parasites of marine invertebrates); Rhombozoa; Cnidaria (corals, anemones, jellyfish, sea pens, sea pansies, sea wasps); Ctenophora (comb jellies); Platyhelminthes (flatworms); Nemertina (ribbon worms); Ngathostomulida (jawed worms)p Gastrotricha; Rotifera; Priapulida; Kinorhyncha; Loricifera; Acanthocephala; Entoprocta; Nemotoda; Nematomorpha; Cycliophora; Mollusca (mollusks); Sipuncula (peanut worms); Annelida (segmented worms); Tardigrada (water bears); Onychophora (velvet worms); Arthropoda (including the subphyla: Chelicerata, Myriapoda, Hexapoda, and Crustacea, where the Chelicerata include, e.g., arachnids, Merostomata, and Pycnogonida, where the Myriapoda include, e.g., Chilopoda (centipedes), Diplopoda (millipedes), Paropoda, and Symphyla, where the Hexapoda include insects, and where the Crustacea include shrimp, krill, barnacles, etc.; Phoronida; Ectoprocta (moss animals); Brachiopoda; Echinodermata (e.g. starfish, sea daisies, feather stars, sea urchins, sea cucumbers, brittle stars, brittle baskets, etc.); Chaetognatha (arrow worms); Hemichordata (acorn worms); and Chordata. Suitable members of Chordata include any member of the following subphyla: Urochordata (sea squirts; including Ascidiacea, Thaliacea, and Larvacea); Cephalochordata (lancelets); Myxini (hagfish); and Vertebrata, where members of Vertebrata include, e.g., members of Petromyzontida (lampreys), Chondrichthyces (cartilaginous fish), Actinopterygii (ray-finned fish), Actinista (coelocanths), Dipnoi (lungfish), Reptilia (reptiles, e.g., snakes, alligators, crocodiles, lizards, etc.), Ayes (birds); and Mammalian (mammals) Suitable plants include any monocotyledon and any dicotyledon.

[0230] Suitable sources of a sample include cells, fluid, tissue, or organ taken from an organism; from a particular cell or group of cells isolated from an organism; etc. For example, where the organism is a plant, suitable sources include xylem, the phloem, the cambium layer, leaves, roots, etc. Where the organism is an animal, suitable sources include particular tissues (e.g., lung, liver, heart, kidney, brain, spleen, skin, fetal tissue, etc.), or a particular cell type (e.g., neuronal cells, epithelial cells, endothelial cells, astrocytes, macrophages, glial cells, islet cells, T lymphocytes, B lymphocytes, etc.).

[0231] In some cases, the source of the sample is a (or is suspected of being a diseased cell, fluid, tissue, or organ, for example of a human subject. In some cases, the source of the sample is a normal (non-diseased) cell, fluid, tissue, or organ. In some cases, the source of the sample is a (or is suspected of being a pathogen-infected cell, tissue, or organ. For example, the source of a sample can be an individual who may or may not be infected—and the sample could be any biological sample (e.g., blood, saliva, biopsy, plasma, serum, bronchoalveolar lavage, sputum, a fecal sample, cerebrospinal fluid, a fine needle aspirate, a swab sample (e.g., a buccal swab, a cervical swab, a nasal swab), interstitial fluid, synovial fluid, nasal discharge, tears, buffy coat, a mucous membrane sample, an epithelial cell sample (e.g., epithelial cell scraping), etc.) collected from the individual. In some cases, the sample is a cell-free liquid sample. In some cases, the sample is a liquid sample that can comprise cells.

[0232] Pathogens to be detected in samples include viruses, bacteria, fungi, helminths, protozoa, malarial parasites, Plasmodium parasites, Toxoplasma parasites, Schistosoma parasites, and the like. “Helminths” include roundworms, heartworms, and phytophagous nematodes (Nematoda), flukes (Tematoda), Acanthocephala, and tapeworms (Cestoda).

[0233] Protozoan infections include infections from Giardia spp., Trichomonas spp., African trypanosomiasis, amoebic dysentery, babesiosis, balantidial dysentery, Chaga's disease, coccidiosis, malaria and toxoplasmosis. Examples of pathogens such as parasitic/protozoan pathogens include, but are not limited to: Plasmodium falciparum, Plasmodium vivax, Trypanosoma cruzi and Toxoplasma gondii. Fungal pathogens include, but are not limited to: Cryptococcus neoformans, Histoplasma capsulatum, Coccidioides immitis, Blastomyces dermatitidis, Chlamydia trachomatis, and Candida albicans. Pathogenic viruses include, e.g., coronaviruses (e.g., COVID-19, MERS, SARS, etc.); immunodeficiency virus (e.g., HIV); influenza virus; dengue; West Nile virus; herpes virus; yellow fever virus; Hepatitis Virus C; Hepatitis Virus A; Hepatitis Virus B; papillomavirus; and the like. Pathogenic viruses can include DNA viruses such as: a papovavirus (e.g., human papillomavirus (HPV), polyomavirus); a hepadnavirus (e.g., Hepatitis B Virus (HBV)); a herpesvirus (e.g., herpes simplex virus (HSV), varicella zoster virus (VZV), epstein-barr virus (EBV), cytomegalovirus (CMV), herpes lymphotropic virus, Pityriasis Rosea, kaposi's sarcoma-associated herpesvirus); an adenovirus (e.g., atadenovirus, aviadenovirus, ichtadenovirus, mastadenovirus, siadenovirus); a poxvirus (e.g., smallpox, vaccinia virus, cowpox virus, monkeypox virus, orf virus, pseudocowpox, bovine papular stomatitis virus; tanapox virus, yaba monkey tumor virus; molluscum contagiosum virus (MCV)); a parvovirus (e.g., adeno-associated virus (AAV), Parvovirus B19, human bocavirus, bufavirus, human parv4 G1); Geminiviridae; Nanoviridae; Phycodnaviridae; and the like. Pathogens can include, e.g., DNAviruses [e.g.: a papovavirus (e.g., human papillomavirus (HPV), polyomavirus); a hepadnavirus (e.g., Hepatitis B Virus (HBV)); a herpesvirus (e.g., herpes simplex virus (HSV), varicella zoster virus (VZV), epstein-barr virus (EBV), cytomegalovirus (CMV), herpes lymphotropic virus, Pityriasis Rosea, kaposi's sarcoma-associated herpesvirus); an adenovirus (e.g., atadenovirus, aviadenovirus, ichtadenovirus, mastadenovirus, siadenovirus); a poxvirus (e.g., smallpox, vaccinia virus, cowpox virus, monkeypox virus, orf virus, pseudocowpox, bovine papular stomatitis virus; tanapox virus, yaba monkey tumor virus; molluscum contagiosum virus (MCV)); a parvovirus (e.g., adeno-associated virus (AAV), Parvovirus B19, human bocavirus, bufavirus, human parv4 G1); Geminiviridae; Nanoviridae; Phycodnaviridae; and the like], Mycobacterium tuberculosis, Streptococcus agalactiae, methicillin-resistant Staphylococcus aureus, Legionella pneumophila, Streptococcus pyogenes, Escherichia coli, Neisseria gonorrhoeae, Neisseria meningitidis, Pneumococcus, Cryptococcus neoformans, Histoplasma capsulatum, Hemophilus influenzae B, Treponema pallidum, Lyme disease spirochetes, Pseudomonas aeruginosa, Mycobacterium leprae, Brucella abortus, rabies virus, influenza virus, cytomegalovirus, herpes simplex virus I, herpes simplex virus II, human serum parvo-like virus, respiratory syncytial virus, varicella-zoster virus, hepatitis B virus, hepatitis C virus, measles virus, adenovirus, human T-cell leukemia viruses, Epstein-Barr virus, murine leukemia virus, mumps virus, vesicular stomatitis virus, Sindbis virus, lymphocytic choriomeningitis virus, wart virus, blue tongue virus, Sendai virus, feline leukemia virus, Reovirus, polio virus, simian virus 40, mouse mammary tumor virus, dengue virus, rubella virus, West Nile virus, Plasmodium falciparum, Plasmodium vivax, Toxoplasma gondii, Trypanosoma rangeli, Trypanosoma cruzi, Trypanosoma rhodesiense, Trypanosoma brucei, Schistosoma mansoni, Schistosoma japonicum, Babesia bovis, Eimeria tenella, Onchocerca volvulus, Leishmania tropica, Mycobacterium tuberculosis, Trichinella spiralis, Theileria parva, Taenia hydatigena, Taenia ovis, Taenia saginata, Echinococcus granulosus, Mesocestoides corti, Mycoplasma arthritidis, M. hyorhinis, M. orale, M. arginini, Acholeplasma laidlawii, M. salivarium and M. pneumoniae.

### Methods

[0234] Thus, methods of the invention include (a) contacting a sample potentially including the target sequence with: (i) any of the compositions or systems as described herein and (b) measuring a detectable signal, thereby detecting the target sequence (DNA or RNA).

[0235] In some cases, the methods comprise contacting a target sensor comprising one or more Cas-effector enzymes programmed with one or more guide RNAs that recognize the desired target nucleic sequence(s) in the sample (e.g., viral DNA or RNA) such that the target sensor is activated into a non-specific nuclease (e.g., non-specific RNase when the target sensor comprises a Cas13 effector protein or non-specific DNase when the target sensor comprises a Cas12 effector protein). In certain cases, the target sensor comprises one Cas-effector protein and one guide RNA. The methods also comprise contacting the activated target sensor (non-specific nuclease) with a reporter molecule, which comprises a detectable label and an amplifier activator sequence, in which the detectable label is masked (quenched) and the amplifier activator molecule is caged (unavailable for hybridization) prior to cleavage by the non-specific nuclease. Upon cleavage, both the detectable label (e.g., fluorescent label) and amplifier activator molecules are released. Subsequently, the released amplifier activator binds to (hybridizes to) a guide RNA of a signal amplifier comprising a Cas-effector protein programmed and the guide RNA, activating an additional non-specific nuclease capable of cleaving the reporter molecule and releasing the detectable label and the amplifier activator molecule from the reporter complex. The methods also comprise measuring the detectable label and, optionally quantifying the levels.

[0236] The contacting steps and measuring steps may be performed in the same or different containers and in liquid and/or solid supports. For example, the contacting may be performed in the same container and transferred for detection or, alternatively, the contacting and measuring steps may be performed in the same container.

[0237] The assay mixture may be incubated under various conditions to allow a target nucleic acid sequence, if present in the sample, to hybridize to the guide RNA. In some embodiments, the conditions are designed to aid in hybridization of RNA sequences, wherein the sequences are 100% complementary. In other embodiments, the conditions for incubation of the assay mixture may be varied to allow for less than 100% complementarity between the guide RNA sequence and the target sequence, for example 1 mismatch between target nucleic acid and guide RNA, or less than about 2 mismatches, 3 mismatches, 4 mismatches, or 5 mismatches. In some embodiments, hybridization between a target RNA and a guide RNA may activate non-specific RNase activity of a Cas-effector protein, when complementarity is greater than about 80%.

[0238] The contacting step of a subject methods can be carried out in a composition comprising divalent metal ions. The contacting step can be carried out in an acellular environment, e.g., outside of a cell. The contacting step can be carried out inside a cell. The contacting step can be carried out in a cell in vitro. The contacting step can be carried out in a cell ex vivo. The contacting step can be carried out in a cell in vivo.

[0239] The contacting step may be for any length of time, including but not limited to 2 hours or less (e.g., 1.5 hours or less, 1 hour or less, 40 minutes or less, 30 minutes or less, 20 minutes or less, 10 minutes or less, or 5 minutes or less, or 1 minute or less) prior to the measuring step. For example, in some cases the sample is contacted for 40 minutes or less prior to the measuring step. In some cases, the sample is contacted for 20 minutes or less prior to the measuring step. In some cases, the sample is contacted for 10 minutes or less prior to the measuring step. In some cases, the sample is contacted for 5 minutes or less prior to the measuring step. In some cases, the sample is contacted for 1 minute or less prior to the measuring step. In some cases, the sample is contacted for from 50 seconds to 60 seconds prior to the measuring step. In some cases, the sample is contacted for from 40 seconds to 50 seconds prior to the measuring step. In some cases, the sample is contacted for from 30 seconds to 40 seconds prior to the measuring step. In some cases, the sample is contacted for from 20 seconds to 30 seconds prior to the measuring step. In some cases, the sample is contacted for from 10 seconds to 20 seconds prior to the measuring step. In some embodiments, the sample is incubated with the Cas protein for less than about 2 hrs., 90 min., 60 min., 40 min., 30 min., 20 min., 10 min., 5 min., 4 min., 3 min., 2 min., 1 min., 55 sec., 50 sec., 40 sec., 30 sec., 20 sec., or 10 sec., and more than about 5 sec., 10 sec., 20 sec., 30 sec., 40 sec., 50 sec., 60 sec., 2 min., 3 min., 4 min., 5 min., 10 min., 20 min., 30 min., 40 min., 50 min., 60 min., or 90 min.

[0240] The method may be conducted at any temperature, including from about 30° C. to about 30° C. (or any temperature therebetween). In some embodiments, the assays (methods) are conducted at a physiological temperature, for example about 37° C. This allows the methods to be readily practiced in any location, including a doctor's office or home (for example by performing the assay using body temperature (e.g., holding the assay contained under the arm, against the skin, etc.). In some embodiments, the assays (methods) are conducted at 60-65° C.

[0241] The methods described herein can detect the target sequence (RNA or DNA) with a high degree of sensitivity. In some cases, a method of the present disclosure can be used to detect a target sequence present in a sample comprising a plurality of nucleotides (including the target sequence and a plurality of non-target sequences), where the target sequence is present at one or more copies per 10⁷ non-target sequences (e.g., one or more copies per 10⁶ non-target sequences, one or more copies per 10⁵ non-target sequences, one or more copies per 10⁴ non-target sequences, one or more copies per 10³ non-target sequences, one or more copies per 10² non-target sequences, one or more copies per 50 non-target sequences, one or more copies per 20 non-target sequences, one or more copies per 10 non-target sequences, or one or more copies per 5 non-target sequences). In some cases, a method of the present disclosure can be used to detect a target sequences present in a sample comprising a plurality of sequences (including the target sequences and a plurality of non-target sequences), where the target sequence is present at one or more copies per 10¹⁸ non-target sequences (e.g., one or more copies per 10¹⁵ non-target sequences, one or more copies per 10¹² non-target sequences, one or more copies per 10⁹ non-target sequences, one or more copies per 10⁶ non-target sequences, one or more copies per 10⁵ non-target sequences, one or more copies per 10⁴ non-target sequences, one or more copies per 10³ non-target sequences, one or more copies per 10² non-target sequences, one or more copies per 50 non-target sequences, one or more copies per 20 non-target sequences, one or more copies per 10 non-target sequences, or one or more copies per 5 non-target sequences).

[0242] In some cases, a method of the present disclosure can detect a target sequence (DNA or RNA) present in a sample, where the target sequences is present at from one copy per 10⁷ non-target sequences to one copy per 10 non-target sequences (e.g., from 1 copy per 10⁷ non-target sequences to 1 copy per 10² non-target sequences, from 1 copy per 10⁷ non-target sequences to 1 copy per 10³ non-target sequences, from 1 copy per 10⁷ non-target sequences to 1 copy per 10⁴ non-target sequences, from 1 copy per 10⁷ non-target sequences to 1 copy per 10⁵ non-target sequences, from 1 copy per 10⁷ non-target sequences to 1 copy per 10⁶ non-target sequences, from 1 copy per 10⁶ non-target sequences to 1 copy per 10 non-target sequences, from 1 copy per 10.sup.6 non-target sequences to 1 copy per 10² non-target sequences, from 1 copy per 10⁶ non-target sequences to 1 copy per 10³ non-target sequences, from 1 copy per 10⁶ non-target sequences to 1 copy per 10⁴ non-target sequences, from 1 copy per 10⁶ non-target sequences to 1 copy per 10⁵ non-target sequences, from 1 copy per 10⁵ non-target sequences to 1 copy per 10 non-target sequences, from 1 copy per 10⁵ non-target sequences to 1 copy per 10² non-target sequences, from 1 copy per 10⁵ non-target sequences to 1 copy per 10³ non-target sequences, or from 1 copy per 10⁵ non-target sequences to 1 copy per 10⁴ non-target sequences).

[0243] In some cases, a method of the present disclosure can detect a target sequence (RNA or DNA) present in a sample, where the target sequences is present at from one copy per 10¹⁸ non-target sequences to one copy per 10 non-target sequences (e.g., from 1 copy per 10¹⁸ non-target sequences to 1 copy per 10² non-target sequences, from 1 copy per 10¹⁵ non-target sequences to 1 copy per 10² non-target sequences, from 1 copy per 10¹² non-target sequences to 1 copy per 10² non-target sequences, from 1 copy per 10⁹ non-target sequences to 1 copy per 10² non-target sequences, from 1 copy per 10⁷ non-target sequences to 1 copy per 10² non-target sequences, from 1 copy per 10⁷ non-target sequences to 1 copy per 10³ non-target sequences, from 1 copy per 10⁷ non-target sequences to 1 copy per 10⁴ non-target sequences, from 1 copy per 10⁷ non-target sequences to 1 copy per 10⁵ non-target sequences, from 1 copy per 10⁷ non-target sequences to 1 copy per 10⁶ non-target sequences, from 1 copy per 10⁶ non-target sequences to 1 copy per 10 non-target sequences, from 1 copy per 10⁶ non-target sequences to 1 copy per 10.sup.2 non-target sequences, from 1 copy per 10.sup.6 non-target sequences to 1 copy per 10³ non-target sequences, from 1 copy per 10⁶ non-target sequences to 1 copy per 10⁴ non-target sequences, from 1 copy per 10⁶ non-target sequences to 1 copy per 10⁵ non-target sequences, from 1 copy per 10⁵ non-target sequences to 1 copy per 10 non-target sequences, from 1 copy per 10⁵ non-target sequences to 1 copy per 10² non-target sequences, from 1 copy per 10⁵ non-target sequences to 1 copy per 10³ non-target sequences, or from 1 copy per 10⁵ non-target sequences to 1 copy per 10⁴ non-target sequences).

[0244] In some cases, a method of the present disclosure can detect a target sequence (RNA or DNA) present in a sample, where the target sequence is present at from one copy per 10⁷ non-target sequences to one copy per 100 non-target sequences (e.g., from 1 copy per 10⁷ non-target sequences to 1 copy per 10² non-target sequences, from 1 copy per 10⁷ non-target sequences to 1 copy per 10³ non-target sequences, from 1 copy per 10⁷ non-target sequences to 1 copy per 10⁴ non-target sequences, from 1 copy per 10⁷ non-target sequences to 1 copy per 10⁵ non-target sequences, from 1 copy per 10⁷ non-target sequences to 1 copy per 10⁶ non-target sequences, from 1 copy per 10⁶ non-target sequences to 1 copy per 100 non-target sequences, from 1 copy per 10⁶ non-target sequences to 1 copy per 10² non-target sequences, from 1 copy per 10⁶ non-target sequences to 1 copy per 10³ non-target sequences, from 1 copy per 10⁶ non-target sequences to 1 copy per 10⁴ non-target sequences, from 1 copy per 10⁶ non-target sequences to 1 copy per 10⁵ non-target sequences, from 1 copy per 10⁵ non-target sequences to 1 copy per 100 non-target sequences, from 1 copy per 10⁵ non-target sequences to 1 copy per 10² non-target sequences, from 1 copy per 10⁵ non-target sequences to 1 copy per 10³ non-target sequences, or from 1 copy per 10⁵ non-target sequences to 1 copy per 10⁴ non-target sequences).

[0245] In some cases, the threshold of detection, for a subject method of detecting a target sequence (RNA or DNA) in a sample, is 10 nM or less. The term “threshold of detection” is used herein to describe the minimal amount of target sequence that must be present in a sample in order for detection to occur. Thus, as an illustrative example, when a threshold of detection is 10 nM, then a signal can be detected when a target sequence is present in the sample at a concentration of 10 nM or more. In some cases, a method of the present disclosure has a threshold of detection of 5 nM or less. In some cases, a method of the present disclosure has a threshold of detection of 1 nM or less. In some cases, a method of the present disclosure has a threshold of detection of 0.5 nM or less. In some cases, a method of the present disclosure has a threshold of detection of 0.1 nM or less. In some cases, a method of the present disclosure has a threshold of detection of 0.05 nM or less. In some cases, a method of the present disclosure has a threshold of detection of 0.01 nM or less. In some cases, a method of the present disclosure has a threshold of detection of 0.005 nM or less. In some cases, a method of the present disclosure has a threshold of detection of 0.001 nM or less. In some cases, a method of the present disclosure has a threshold of detection of 0.0005 nM or less. In some cases, a method of the present disclosure has a threshold of detection of 0.0001 nM or less. In some cases, a method of the present disclosure has a threshold of detection of 0.00005 nM or less. In some cases, a method of the present disclosure has a threshold of detection of 0.00001 nM or less. In some cases, a method of the present disclosure has a threshold of detection of 10 pM or less. In some cases, a method of the present disclosure has a threshold of detection of 1 pM or less. In some cases, a method of the present disclosure has a threshold of detection of 500 fM or less. In some cases, a method of the present disclosure has a threshold of detection of 250 fM or less. In some cases, a method of the present disclosure has a threshold of detection of 100 fM or less. In some cases, a method of the present disclosure has a threshold of detection of 50 fM or less. In some cases, a method of the present disclosure has a threshold of detection of 500 aM (attomolar) or less. In some cases, a method of the present disclosure has a threshold of detection of 250 aM or less. In some cases, a method of the present disclosure has a threshold of detection of 100 aM or less. In some cases, a method of the present disclosure has a threshold of detection of 50 aM or less. In some cases, a method of the present disclosure has a threshold of detection of 10 aM or less. In some cases, a method of the present disclosure has a threshold of detection of 1 aM or less.

[0246] In some cases, the threshold of detection (for detecting the target sequence in a subject method), is in a range of from 500 fM to 1 nM (e.g., from 500 fM to 500 pM, from 500 fM to 200 pM, from 500 fM to 100 pM, from 500 fM to 10 pM, from 500 fM to 1 pM, from 800 fM to 1 nM, from 800 fM to 500 pM, from 800 fM to 200 pM, from 800 fM to 100 pM, from 800 fM to 10 pM, from 800 fM to 1 pM, from 1 pM to 1 nM, from 1 pM to 500 pM, from 1 pM to 200 pM, from 1 pM to 100 pM, or from 1 pM to 10 pM) (where the concentration refers to the threshold concentration of target sequence at which the target sequence can be detected). In some cases, a method of the present disclosure has a threshold of detection in a range of from 800 fM to 100 pM. In some cases, a method of the present disclosure has a threshold of detection in a range of from 1 pM to 10 pM. In some cases, a method of the present disclosure has a threshold of detection in a range of from 10 fM to 500 fM, e.g., from 10 fM to 50 fM, from 50 fM to 100 fM, from 100 fM to 250 fM, or from 250 fM to 500 fM.

[0247] In some cases, the minimum concentration at which a target sequence (DNA or RNA) can be detected in a sample is in a range of from 500 fM to 1 nM (e.g., from 500 fM to 500 pM, from 500 fM to 200 pM, from 500 fM to 100 pM, from 500 fM to 10 pM, from 500 fM to 1 pM, from 800 fM to 1 nM, from 800 fM to 500 pM, from 800 fM to 200 pM, from 800 fM to 100 pM, from 800 fM to 10 pM, from 800 fM to 1 pM, from 1 pM to 1 nM, from 1 pM to 500 pM, from 1 pM to 200 pM, from 1 pM to 100 pM, or from 1 pM to 10 pM). In some cases, the minimum concentration at which a target sequence can be detected in a sample is in a range of from 800 fM to 100 pM. In some cases, the minimum concentration at which a target sequence can be detected in a sample is in a range of from 1 pM to 10 pM.

[0248] In some cases, the threshold of detection (for detecting the target sequences), is in a range of from 1 aM to 1 nM (e.g., from 1 aM to 500 pM, from 1 aM to 200 pM, from 1 aM to 100 pM, from 1 aM to 10 pM, from 1 aM to 1 pM, from 100 aM to 1 nM, from 100 aM to 500 pM, from 100 aM to 200 pM, from 100 aM to 100 pM, from 100 aM to 10 pM, from 100 aM to 1 pM, from 250 aM to 1 nM, from 250 aM to 500 pM, from 250 aM to 200 pM, from 250 aM to 100 pM, from 250 aM to 10 pM, from 250 aM to 1 pM, from 500 aM to 1 nM, from 500 aM to 500 pM, from 500 aM to 200 pM, from 500 aM to 100 pM, from 500 aM to 10 pM, from 500 aM to 1 pM, from 750 aM to 1 nM, from 750 aM to 500 pM, from 750 aM to 200 pM, from 750 aM to 100 pM, from 750 aM to 10 pM, from 750 aM to 1 pM, from 1 fM to 1 nM, from 1 fM to 500 pM, from 1 fM to 200 pM, from 1 fM to 100 pM, from 1 fM to 10 pM, from 1 fM to 1 pM, from 500 fM to 500 pM, from 500 fM to 200 pM, from 500 fM to 100 pM, from 500 fM to 10 pM, from 500 fM to 1 pM, from 800 fM to 1 nM, from 800 fM to 500 pM, from 800 fM to 200 pM, from 800 fM to 100 pM, from 800 fM to 10 pM, from 800 fM to 1 pM, from 1 pM to 1 nM, from 1 pM to 500 pM, from 1 pM to 200 pM, from 1 pM to 100 pM, or from 1 pM to 10 pM) (where the concentration refers to the threshold concentration of target sequence at which the target sequence can be detected). In some cases, a method of the present disclosure has a threshold of detection in a range of from 1 aM to 800 aM. In some cases, a method of the present disclosure has a threshold of detection in a range of from 50 aM to 1 pM. In some cases, a method of the present disclosure has a threshold of detection in a range of from 50 aM to 500 fM.

[0249] In some cases, the minimum concentration at which a target sequence can be detected in a sample is in a range of from 1 aM to 1 nM (e.g., from 1 aM to 500 pM, from 1 aM to 200 pM, from 1 aM to 100 pM, from 1 aM to 10 pM, from 1 aM to 1 pM, from 100 aM to 1 nM, from 100 aM to 500 pM, from 100 aM to 200 pM, from 100 aM to 100 pM, from 100 aM to 10 pM, from 100 aM to 1 pM, from 250 aM to 1 nM, from 250 aM to 500 pM, from 250 aM to 200 pM, from 250 aM to 100 pM, from 250 aM to 10 pM, from 250 aM to 1 pM, from 500 aM to 1 nM, from 500 aM to 500 pM, from 500 aM to 200 pM, from 500 aM to 100 pM, from 500 aM to 10 pM, from 500 aM to 1 pM, from 750 aM to 1 nM, from 750 aM to 500 pM, from 750 aM to 200 pM, from 750 aM to 100 pM, from 750 aM to 10 pM, from 750 aM to 1 pM, from 1 fM to 1 nM, from 1 fM to 500 pM, from 1 fM to 200 pM, from 1 fM to 100 pM, from 1 fM to 10 pM, from 1 fM to 1 pM, from 500 fM to 500 pM, from 500 fM to 200 pM, from 500 fM to 100 pM, from 500 fM to 10 pM, from 500 fM to 1 pM, from 800 fM to 1 nM, from 800 fM to 500 pM, from 800 fM to 200 pM, from 800 fM to 100 pM, from 800 fM to 10 pM, from 800 fM to 1 pM, from 1 pM to 1 nM, from 1 pM to 500 pM, from 1 pM to 200 pM, from 1 pM to 100 pM, or from 1 pM to 10 pM). In some cases, the minimum concentration at which a target sequence can be detected in a sample is in a range of from 1 aM to 500 pM. In some cases, the minimum concentration at which a target sequence can be detected in a sample is in a range of from 100 aM to 500 pM.

[0250] In some cases, a subject composition or method exhibits an attomolar (aM) sensitivity of detection. In some cases, a subject composition or method exhibits a femtomolar (fM) sensitivity of detection. In some cases, a subject composition or method exhibits a picomolar (pM) sensitivity of detection. In some cases, a subject composition or method exhibits a nanomolar (nM) sensitivity of detection.

[0251] The measuring can in some cases be quantitative, e.g., in the sense that the amount of signal detected can be used to determine the amount of target sequence present in the sample. The measuring can in some cases be qualitative, e.g., in the sense that the presence or absence of detectable signal can indicate the presence or absence of targeted sequence (e.g., virus, SNP, etc.). In some cases, a detectable signal will not be present (e.g., above a given threshold level) unless the targeted sequences(s) (e.g., virus, SNP, etc.) is present above a particular threshold concentration. In some cases, the threshold of detection can be titrated by modifying the amount of Cas effector protein of the system (e.g., sensor or amplifier), guide RNA, sample volume, and/or detector (if one is used). As such, for example, as would be understood by one of ordinary skill in the art, a number of controls can be used if desired in order to set up one or more reactions, each set up to detect a different threshold level of target sequence, and thus such a series of reactions could be used to determine the amount of target sequence present in a sample (e.g., one could use such a series of reactions to determine that a target sequence is present in the sample ‘at a concentration of at least X’).

[0252] In some cases, a method of the present disclosure can be used to determine the amount of a target sequence (RNA or DNA) in a sample (e.g., a sample comprising the target sequence and a plurality of non-target sequences). Determining the amount of a target sequence in a sample can comprise comparing the amount of detectable signal generated from a test sample to the amount of detectable signal generated from a reference sample. Determining the amount of a target sequence in a sample can comprise: measuring the detectable signal to generate a test measurement; measuring a detectable signal produced by a reference sample to generate a reference measurement; and comparing the test measurement to the reference measurement to determine an amount of target sequence present in the sample.

[0253] RNase inhibitors may be used in the methods as described herein. In some embodiments, the assay mixture may include one or more molecules that inhibit non-Cas13a-dependent RNase activity, but do not affect RNase activity by activated Cas13a proteins. For example, the inhibitor may inhibit mammalian, bacterial, or viral RNases, such as, without limitation, RNase A and RNase H. In some embodiments, the RNase Inhibitor may be added to the sample to help preserve a target nucleic acid sequence. In these embodiments, the method may include a step of adding one or more RNA preserving compounds to the sample, for example one or more RNase inhibitors.

[0254] Detecting the label may be achieved in various ways known in the art. For example, detection of colorimetric, fluorescent, or luminescent labels may be accomplished by measurement of absorbance or emission of light at a particular wavelength. In some embodiments the signal may be detected by visual inspection, microscope, or light detector.

### Kits

[0255] The present disclosure provides a kit for detecting a target nucleotide sequences, e.g., in a sample comprising a plurality of sequences. In some cases, the kit comprises one or more NCR compositions or systems as described herein. Positive and/or negative controls may also be included and/or instructions for use may also be included.

### EXAMPLES

### Example 1: Nuclease Chain Reaction Detection of Coronavirus DNA

[0256] Experiments were conducted to compare detection without nuclease chain reaction (NCR) or with NCR systems as described herein using a synthetic target sequence (“Primary activator”). In particular, assays were conducted with NCR systems as described herein using a primary activator sequence detected by a primary activator complex triggering non-specific cleavage activity which leads to a fluorescent signal (see FIG. 1A). In addition to activation of the primary activator complex, activation of a signal amplified complex can also occur when the non-specific cleavage activity releases a cage from a caged activator RNA (FIG. 1). In some cases, additional activation occurs via Csm6. In some cases, the primary activator complex is an RNP comprising a Cas13 protein (FIG. 1C), while in other cases, the primary activator complex comprises a Cas12 protein (FIG. 1D). When Cas12 is used in the primary activator approach, the primary activator nucleic acid may be subject to RT-LAMP if the primary activator molecule is RNA. Either of these systems may include the use of Csm6 to boost signal. A caged activator for Csm6 would include four or six adenosines (A4 or A6) at the 5′ end of the sequence that may be modified to prevent premature cleavage (e.g. 2′-OMe, 2′-H, 2′-F) by either itself or Cas13. The Csm6 activator also has additional cleavable A's or U's at its 3′ end that cage the substrate. Uncaging would be accomplished by trimming away the 3′ RNA nucleotides to generate either A4>P or A6>P to activate Csm6. The identity of the 3′-nucleotides used to cage the substrate can vary, depending on the nucleotide preference of the Cas enzyme used for uncaging. For example, one potential substrate could be 5′-fA-fA-fA-AAAAAAA-3′ (SEQ ID NO:1), in which fA nucleotides have the 2′-F modification, and the 6 terminal A's could be cleaved by either Csm6 or LbaCas13.

[0257] In some cases, the primary activator complex is an RNP comprising a Cas13 protein and a guide specific for the primary activator RNA, while the signal amplification complex also comprises an RNP comprising a Cas13 protein and a guide specific for an activator RNA (FIG. 1E). In some cases, the primary activator complex is an RNP comprising a Cas12 protein and a guide specific for the primary activator RNA which is made using RT-LAMP. The signal activation complex also comprises a Cas12 protein and a guide specific for the activator DNA (FIG. 1F). In either case, Csm6 amplification may also be utilized.

[0258] In some cases, the primary activation complex comprises a Cas13, and caged guide RNAs are used. In some cases, the cage is on the 3′end of the guide molecule, wherein in other cases, the cage is on the 5′ end of the guide (FIG. 1E). In some cases, the activator RNA is caged (FIG. 1F, strategy 1) while in other cases, the activator RNA and/or the amplifier guide is caged (FIG. 1F, strategy 2). In all cases, cages may be present on the 5′, 3′ or 5′ and 3′ ends of the molecules. Cages may also be used on nucleic acid activators used with Csm6 amplification.

[0259] Various activator RNAs were tested in the presence or absence of primary activator. In addition, assays without NCR capability were also conducted in experiments lacking the activator RNA sequences and the primary activator complex (“No secondary” in FIG. 2). In these experiments, the primary activator and the activator RNA sequences were the same, sequence R004 below in Table 2A in the control experiments. The activator RNAs tested all contained the same sequence linked to differing caging sequences to determine the cage structure that would result in the best induction of the amplification pathway while preventing activation in the absence of primary activator. Sequences used in this experiment are presented below in Table 2A. Note: the designation “-nc” identifies nucleic acids lacking any cage structure.

TABLE 2A
Synthetic target, detector and amplifier nucleic acids

| | | | SEQ |
|---|---|---|---|
| | | | ID |
| Role | Name | Sequence (5′-3′) | NO |
| Primary | R004 | AAAAGCCUGAACCACCAGGCUAUAUCUG | 3 |
| activator- | | | |
| nc | | | |
| Primary | R010 | auuuagaccaccccaaaaaugaaggggacuaaaacaCAGAUAUAGCCUGGUGGUUCAGGC | 4 |
| guide RNA- | | | |
| nc | | | |
| Activator | NCR_034 | UAGACCACCCCAAAAAUGAAGGGGACUAAAACUUGUUUCUUUCUGUUGUUUC | 5 |
| guide RNA- | | | |
| nc | | | |
| Activator | NCR_042 | GAC GAG AGA CCG ACA CAA Aa aUUg GC C GAAA GGC cc CACA cA CaUGU GUC | 6 |
| RNA | | GGU CUC UCG | |
| Activator | NCR_045 | GAC GAG AGA CCG ACA CAA Aa aUUg GGCUUCGGCC cc CACA cA CaUGU GUC | 7 |
| RNA | | GGU CUC UCG | |
| Activator | NCR_057 | GAAACAACAGAAAGAAACAaCUU | 8 |
| RNA-nc | | | |
| Activator | NCR_058 | GAAACAACAGAAAGAAACAaCUU GCA AGA AAC AUC UGU UGU UUC | 9 |
| RNA | | | |
| Activator | NCR_059 | GAAACAACAGAAAGAAACAaCUU GCA AGA UCU UUC UGUUGU | 10 |
| RNA | | | |
| Activator | NCR_060 | GAAACAACAGAAAGAAACAaCUU GCA AUU UCU UUC UGUUGUU | 11 |
| RNA | | | |
| Activator | NCR_061 | GAAACAACAGAAAGAAACAaCUU GCA AUU UCU UUC UGUUGUUUC | 12 |
| RNA | | | |
| Activator | NCR_062 | GAAACAACAGAAAGAAACAa aUUg GC C GAAA GGC cc CACAcA CaUUU CUG | 13 |
| RNA | | UUG | |
| Activator | NCR_063 | GAAACAACAGAAAGAAACAa aUUg GC C GAAA GGC cc CACAcA CaGUU UCU | 14 |
| RNA | | UUC UGU UGU UU | |
| Activator | NCR_064 | GAAACAACAGAAAGAAACAa aUUg GC C GAAA GGC cc CACAcA CaUU GUU UCU | 15 |
| RNA | | UUC UGU UGU UUC | |
| Activator | NCR_065 | GAAACAACAGAAAGAAACAa aUUg GGCUUCGGCC cc CACAcA CaUUU CUG UUG | 16 |
| RNA | | | |
| Activator | NCR_066 | GAAACAACAGAAAGAAACAa aUUg GGCUUCGGCC cc CACAcA CaGUU UCU UUC | 17 |
| RNA | | UGU UGU UU | |
| Activator | NCR_067 | GAAACAACAGAAAGAAACAa aUUg GGCUUCGGCC cc CACACA CaUU GUU UCU | 18 |
| RNA | | UUC UGU UGU UUC | |
| Activator | NCR_193 | GAA ACA ACA GAA AGA AAC Aa GUU UCA AUU UCU UUC UGU UGU UUC | 19 |
| RNA | | | |

[0260] For all reactions indicated, Ix buffer: 20 mM HEPES (pH 6.8), 50 mM KCL, 100 ug/ml BSA, 0.0100 Igepal. Integrated Detection Technologies (IDT) synthesized guide RNAs and activator RNAs were assembled in 5 μM reactions using Ix buffer, and folded by boiling at 95° C. for 3 min in a thermocycler, followed by immediate cooling on ice. Cas13-crRNA complexes targeting the primary activator, and amplifier RNA were assembled separately for 10 min at room temperature in Ix buffer using a 2:1 protein to crRNA ratio, with 1 μM Cas113, and 0.5 μM crRNA. RNP complexes targeting caged amplifiers were then mixed with RNP targeting the primary activator, and further diluted using Ix buffer in the presence of 200 nM RNase alert substrate (IDT DNA), 20 nM amplifier RNA, and varying amounts of primary activator (1 nM-1 aM). A final concentration of 50 nM RNP targeting the primary activator, and 1 nM-50 nM RNP targeting the amplifier RNA was used. Reactions were incubated in a fluorescence plate reader for up to 120 min at 37° C., with fluorescence measurements taken every 30 s (λex: 485 nm; λem: 535 nm).

[0261] As shown in FIG. 2, for among the different activator RNAs evaluated, NCR_061 showed the greatest differential between signal in the presence of activator and signal without activator. Furthermore, the NCR systems showed a differential increased the detectable signal from the synthetic target sequence as compared to the signal in the experiments lacking the primary activator. NCR_45 and NCR_42 showed some differential in signal between signal in the absence of amplification (“Primary alone”) and when both activation and amplification processes were occurring (“Cage+Primary”). NCR_67 did not display any differential signal. NCR_061 gave a rapid amplification when both primary and amplification were present (“NCR061_amp”) that was separated from the data observable from primary signal only (“Primary Act only”). Use of the NCR_061 amplification pathway only (“NCR061 cage only”) gave signal which was delayed as compared to activation+amplification.

[0262] FIG. 3A-3D shows results of experiments using four activator RNAs tested over time, (NCR 42, NCR 45, NCR_61 and NCR 67) showed a range of different results (FIG. 3).

[0263] Further optimization of signal was done by varying the concentration of primary activation RNP complex added (FIG. 4A). Measurements over time showed rapid signal onset when 200 pM of primary activation complex was used in this experiment (FIG. 4B). At the end time point, the signal detected for primary activator only and primary plus amplification using the NCR showed similar signal (FIG. 4C) but when the measurements were taken over time, the experiment with primary+NCR showed a more rapid rise of signal (FIG. 4D).

[0264] Activator RNAs comprising an anti-TAG sequence were also tested. An anti-TAG sequence was included in NCR_061 such that signal from the primary activation and activator-RNA-alone driven signal is much less than the primary activation+NCR (FIG. 5A-5E).

[0265] Activator RNAs based on the NCR_061 sequence comprising alternative caging structures were designed and tested. The NCR_176 activator RNA comprises 3× more polyU sequences and the NCR_177 comprises 6× more polyU sequences. In these experiments, Cas12 was used in the primary sensing complex while Cas13 was used in the amplification complex. LbuCas13a was used for the Cas13 component, and the increased polyU sequences were included for potentially more recognition and cleavage by its trans RNase activity. The results (FIG. 5A-5E) show an increase in signal using the caged activators that are more easily released by LbuCas13a.

[0266] An NCR reaction testing use of another caged amplifier crRNA was also performed. Sequences for the uncaged and caged guides as well as other sequences tested are shown below in Table 2B.

TABLE 2B
Nucleic Acids used

| | | | SEQ ID |
|---|---|---|---|
| Role | Name | Sequence (5′-3′) | NO |
| Amplifier | NCR_009-nc | UAGACCACCCCAAAAAUGAAGGGGACUAAAACGCGAGAACAGGACGAAGCAG | 20 |
| crRNA | | | |
| Amplifier | NCR_0018 | UAGACCACCCCAAAAAUGAAGGGGACUAAAACGAAACAACAGAAAGAAACAAGUUA | 21 |
| crRNA | | UACAUACUUUCUGUUGUU | |
| Amplifier | NCR_265 | UAGACCACCCCAAAAAUGAAGGGGACUAAAACGAAACAACAGAAAGAAACAAGUUA | 22 |
| crRNA | | UACAUACUUUCUGUUGUUU | |
| Amplifier | NCR_266 | UAGACCACCCCAAAAAUGAAGGGGACUAAAACGAAACAACAGAAAGAAACAAGUUA | 23 |
| crRNA | | UACAUACUUUCUGUUGUUUCGU | |
| Amplifier | NCR_267 | UAGACCACCCCAAAAAUGAAGGGGACUAAAACGAAACAACAGAAAGAAACAAGUUA | 24 |
| crRNA | | UACAUACUUCCUGUUGUCUCGU | |
| Amplifier | NCR_035 | GAC GAG AGA CCA ACA CAA Aa | 25 |
| RNA-nc | | | |
| Amplifier | NCR_036 | GAC GAG AGA CCG ACA CAA AaCUU GGA CUU UUG UGU CGG UC | 26 |
| RNA | | | |
| Amplifier | NCR_038 | GAC GAG AGA CCG ACA CAA AaCUU GGA CAC UGUCGG UCUCU | 27 |
| RNA | | | |
| Amplifier | NCR_039 | GAC GAG AGA CCG ACA CAA AaCUU GGA CAG UGUCGG UCUCUC | 28 |
| RNA | | | |
| Trans cage | NCR_268 | GUUUUAGUCC UUUUU CCUUCAUUUU | [39]] |
| | | | 29 |
| Trans cage | NCR_269 | UUCAUUUUUG UUUUU GGGUGGUCUA | 30 |
| Trans cage | NCR_270 | GUUUUAGUCCCCUUCAUU UUUUU UUUGGGGUGGUCUA | 31 |
| Trans cage | NCR_271 | UUUUGUGUUG UUUUU GUCUCUCGUC | 32 |

[0267] The use of the caged amplifier crRNA NCR_018 demonstrated a boost in signal as compared with the uncaged amplifier crRNA NCR_009 (see FIG. 6A-6C). When background signal (signal in the absence of primary activator and caged amplifier crRNA only signal) is subtracted, a large increase in detection is observed.

[0268] Further, in an effort to reduce background signal observed in the presence caged amplifier crRNA and Cas13 alone, various alternative caging structures were tested. Exemplary results are shown in FIG. 7, where some improvement of background subtracted signal was observed.

[0269] The size of the loop in the caged structure was also tested. Caged crRNAs comprising loops with different melting temperatures were tested (see FIG. 8). The results demonstrated that those cage structures with the lowest melting temperature showed the most rapid signal generation. For example, NCR_038 comprises a 14 nucleotide single stranded loop with a melting temperature of 34° C. and demonstrated similar signal kinetics as the uncaged activator RNA (NCR 035). NCR 039 (12 nucleotide loop) and NCR_036 (12 nucleotide loop) demonstrated slower signal kinetics in this experiment.

[0270] Trans cages were also tested in the system. Several trans cages (see Table 2B) were synthesized for Cas13a crRNAs that comprised different single stranded regions for potential cleavage by trans nuclease activity of an activated Cas complex. The trans cages were constructed to have the single stranded loops occur in different locations when complexed with the crRNAs (see FIG. 9A). The trans age molecules were then tested in varying ratios with respect to the crRNA used (e.g. 20:1, 2:1, 1:1, and 1:2 ratios of trans cage: crRNA). The results demonstrated that in ratios of 2:1, 1:1, and 1:2, background signal was still detected, so inhibition of non-specific background signal was only detected at a ratio of 20:1 in this experiment (see FIG. 9B).

### Example 2

[0271] A Cas13-guide RNA complex recognizes target ssRNA sequence, activating it for RNA cleavage. The target ssRNA is a sequence specific for SARS-Co-V2. Also included are experiments run with a target ssRNA that is pan-coronavirus specific (“Pan-corona”). Examples of these sequences are shown below in Table 3. Also shown are sequences of the SARS-CoV-2 N and E genes that may be used to identify specific target sequences:

TABLE 3
Coronavirus specific target nucleic acids

| | | SEQ |
|---|---|---|
| | | ID |
| Specificity | Sequence | NO |
| SARS-Co- | UGUAUGGAAAAGUUAUGUGC | 33 |
| V2 | | |
| SARS-Co- | GCAGAUAGUAAAAUUGUUCA | 34 |
| V2 | | |
| SARS- | AGACUUCAUUAAGAUGUGGU | 35 |
| CoV2 | | |
| Pan-corona | AUGGGUUGGGAUUAUCCUAA | 36 |
| Pan-corona | UGGGAUUAUCCUAAAUGUGA | 37 |
| Pan-corona | GGGAUUAUCCUAAAUGUGAU | 38 |
| SARS-CoV- | gaaatTAATACGACTCACTATAgggGTGAGTTTAAATTGGCTTCACAT | 39 |
| 2* | ATGTATTGTTCTTTCTACCCTCCAGATGAGGATGAAGAAGAAGGTGAT | |
| | TGTGAAGAAGAAGAGTTTGAGCCATCAACTCAATATGAGTATGGTACT | |
| | GAAGATGATTACCAAGGTAAACCTTTGGAATTTGGTGCCACTTCTGCT | |
| | GCTCTTCAACCTGAAGAAGAGCAAGAAGAAGATTGGTTAGATGATGAT | |
| | AGTCAACAAACTGTTGGTCAACAAGACGGCAGTGAGGACAATCAGACA | |
| | ACTACTATTCAAACAATTGTTGAGGTTCAACCTCAATTAGAGATGGAA | |
| | CTTACACCAGTTGTTCAGACTATTGAAGTGAATAGTTTTAGTGGTTAT | |
| | TTAAAACTTACTGACAATGTATACATTAAAAATGCAGACATTGTGGAA | |
| | GAAGCTAAAAAGGTAAAACCAACAGTGGTTGTTAATGCAGCCAATGTT | |
| | TACCTTAAACATGGAGGAGG | |
| SARs-CoV- | CCAAATTGGCTACTACCGAAGAGCTACCAGACGAATTCGTGGTGGTGACGGTAAAATGAAAG | 40 |
| 2 N gene** | ATCTCAGTCCAAGATGGTATTTCTACTACCTAGGAACTGGGCCAGAAGCTGGACTTCCCTATG | |
| | GTGCTAACAAAGACGGCATCATATGGGTTGCAACTGAGGGAGCCTTGAATACACCAAAAGAT | |
| | CACATTGGCACCCGCAATCCTGCTAACAATGCTGCAATCGTGCTACAACTTCCTCAAGGAACA | |
| | ACATTGCCAAAAGGCTTCTACGCAGAAGGGAGCAGAGGCGGCAGTCAAGCCTCTTCTCGTTC | |
| | CTCATCACGTAGTCGCAACAGTTCAAGAAATTCAACTCCAGGCAGCAGTAGGGGAACTTCTC | |
| | CTGCTAGAATGGCTGGCAATGGCGGTGATGCTGCTCTTGCTTTGCTGCTGCTTGACAGATTGA | |
| | ACCAGCTTGAGAGCAAAATGTCTGGTAAAGGCCAACAACAACAAGGCCAAACTGTCACTAAGA | |
| | AATCTGCTGCTGAGGCTTCTAAGAAGCCTCGGCAAAAACGTACTGCCACTAAAGCATACAATG | |
| | TAACACAAGCTTTCGGCAGACGTGGTCCAGAACAAACCCAAGGAAATTTTGGGGACCAGGAAC | |
| | TAATCAGACAAGGAACTGATTACAAACATTGGCCGCAAATTGCACAATTTGCCCCCAGCGCTT | |
| | CAGCGTTCTTCGGAATGTCGCGCATTGGCATGGAAGTCACACCTTCGGGAACGTGGTTGACCT | |
| | ACACAGGTGCCATCAAATTGGATGACAAAGATCCAAATTTCAAAGATCAAGTCATTTTGCTGA | |
| | ATAAGCATATTGACGCATACAAAACATTCCCACCAACAGAGCCTAAAAAGGACAAAAAGAAGA | |
| | AGGCTGATGAAACTCAAGCCTTACCGCAGAGACAGAAGAAACAGCAAACTGTG | |
| SARS CoV- | ACTATTACCAGCTGTACTCAACTCAATTGAGTACAGACACTGGTGTTGAACATGTTACCTTC | 41 |
| 2 E gene** | TTCATCTACAATAAAATTGTTGATGAGCCTGAAGAACATGTCCAAATTCACACAATCGACGG | |
| | TTCATCCGGAGTTGTTAATCCAGTAATGGAACCAATTTATGATGAACCGACGACGACTACTA | |
| | GCGTGCCTTTGTAAGCACAAGCTGATGAGTACGAACTTATGTACTCATTCGTTTCGGAAGAG | |
| | ACAGGTACGTTAATAGTTAATAGCGTACTTCTTTTTCTTGCTTTCGTGGTATTCTTGCTAGT | |
| | TACACTAGCCATCCTTACTGCGCTTCGATTGTGTGCGTACTGCTGCAATATTGTTAACGTGA | |
| | GTCTTGTAAAACCTTCTTTTTACGTTTACTCTCGTGTTAAAAATCTGAATTCTTCTAGAGTT | |
| | CCTGATCTTCTGGTCTAAACGAACTAAATATTATATTAGTTTTTCTGTTTGGAACTTTAATT | |
| | TTAGCCATGGCAGATTCCAACGGTACTATTACCGTTGAAGAGCTTAAAAAGCTCCTTGAACA | |
| | ATGGAACCTAGTAATAGGTTTCCTATTCCTTACATGGATT | |

*from Metsky et al (2020) BioRxiv doi.org/10.1101/2020.02.26.967026.
**from Broughton et al (2020) Nature doi.org/10.1038/s41587-020-0513-4
For other SARS Co-V-2 target sequences, see Abbott et al (2020) BioRxiv doi.org/10.1101/2020.03.13.991307; Rauch et al (2020) BioRxiv doi.org/10.1101/2020.04.20.052159.

[0272] Guide RNAs (crRNAs) are prepared for use with Cas13a that target the SARS-CoV-2 genome. Exemplary guide sequences are shows below in Table 4.

TABLE 4
Guide RNAs for use with Cas13a

| Use | Name | Sequence 5′-3′ | SEQ ID NO |
|---|---|---|---|
| Cas13a crRNA targeting | NCR_273 | UAGACCACCCCAAAAAUGAAGGGGACUAAAACAAUUUGA | 42 |
| SARS-Cov-2 | | UGGCACCUGUGUA | |
| Cas13a crRNA targeting | NCR_274 | UAGACCACCCCAAAAAUGAAGGGGACUAAAACUAGAUCU | 43 |
| SARS-Cov-2 | | GUGUGGCCAACCU | |
| Cas13a crRNA targeting | NCR_275 | UAGACCACCCCAAAAAUGAAGGGGACUAAAACGCACCAGC | 44 |
| SARS-Cov-2 | | UGUCCAACCUGA | |
| Cas13a crRNA targeting | NCR_276 | UAGACCACCCCAAAAAUGAAGGGGACUAAAACAUAAUAA | 45 |
| SARS-Cov-2 | | GCUGCAGCACCAG | |
| Cas13a crRNA targeting | NCR_277 | UAGACCACCCCAAAAAUGAAGGGGACUAAAACUAACCCAC | 46 |
| SARS-Cov-2 | | AUAAUAAGCUGC | |
| Cas13a crRNA targeting | NCR_278 | UAGACCACCCCAAAAAUGAAGGGGACUAAAACAGAUAAC | 47 |
| SARS-Cov-2 | | CCACAUAAUAAGC | |
| Cas13a crRNA targeting | NCR_279 | UAGACCACCCCAAAAAUGAAGGGGACUAAAACGAAGAUA | 48 |
| SARS-Cov-2 | | ACCCACAUAAUAA | |
| Cas13a crRNA targeting | NCR_280 | UAGACCACCCCAAAAAUGAAGGGGACUAAAACUGAAGAU | 49 |
| SARS-Cov-2 | | AACCCACAUAAUA | |
| Cas13a crRNA targeting | NCR_281 | UAGACCACCCCAAAAAUGAAGGGGACUAAAACUUGAAGA | 50 |
| SARS-Cov-2 | | UAACCCACAUAAU | |
| Cas13a crRNA targeting | NCR_282 | UAGACCACCCCAAAAAUGAAGGGGACUAAAACGUUGAAG | 51 |
| SARS-Cov-2 | | AUAACCCACAUAA | |
| Cas13a crRNA targeting | NCR_283 | UAGACCACCCCAAAAAUGAAGGGGACUAAAACCUCACCAC | 52 |
| SARS-Cov-2 | | UACGACCGUACU | |
| Cas13a crRNA targeting | NCR_284 | UAGACCACCCCAAAAAUGAAGGGGACUAAAACACAUGAG | 53 |
| SARS-Cov-2 | | GGACAAGGACACC | |
| Cas13a crRNA targeting | NCR_285 | UAGACCACCCCAAAAAUGAAGGGGACUAAAACAUCAUCU | 54 |
| SARS-Cov-2 | | UCAGUACCAUACU | |
| Cas13a crRNA targeting | NCR_286 | UAGACCACCCCAAAAAUGAAGGGGACUAAAACAAGUGGC | 55 |
| SARS-Cov-2 | | ACCAAAUUCCAAA | |
| Cas13a crRNA targeting | NCR_287 | UAGACCACCCCAAAAAUGAAGGGGACUAAAACUAUCAUC | 56 |
| SARS-Cov-2 | | AUCUAACCAAUCU | |
| Cas13a crRNA targeting | NCR_288 | UAGACCACCCCAAAAAUGAAGGGGACUAAAACUCCUCACU | 57 |
| SARS-Cov-2 | | GCCGUCUUGUUG | |
| Cas13a crRNA targeting | NCR_289 | UAGACCACCCCAAAAAUGAAGGGGACUAAAACUAAGUUC | 58 |
| SARS-Cov-2 | | CAUCUCUAAUUGA | |
| Cas13a crRNA targeting | NCR_290 | UAGACCACCCCAAAAAUGAAGGGGACUAAAACACUUCAG | 59 |
| SARS-Cov-2 | | UACAUCAAACGAA | |
| Cas13a crRNA targeting | NCR_291 | UAGACCACCCCAAAAAUGAAGGGGACUAAAACCAUUCCCU | 60 |
| SARS-Cov-2 | | GCGCGUCCUCUG | |
| Cas13a crRNA targeting | NCR_292 | UAGACCACCCCAAAAAUGAAGGGGACUAAAACCGCAGGCA | 61 |
| SARS-Cov-2 | | AGAUUAUCCAUU | |
| Cas13a crRNA targeting | NCR_293 | UAGACCACCCCAAAAAUGAAGGGGACUAAAACAAGUGAG | 62 |
| SARS-Cov-2 | | GCCAUAAUUCUAA | |
| Cas13a crRNA targeting | NCR_294 | UAGACCACCCCAAAAAUGAAGGGGACUAAAACACCAUAG | 63 |
| SARS-Cov-2 | | GGAAGUCCAGCUU | |
| Cas13a crRNA targeting | NCR_295 | UAGACCACCCCAAAAAUGAAGGGGACUAAAACCCGUCUU | 64 |
| SARS-Cov-2 | | UGUUAGCACCAUA | |
| Cas13a crRNA targeting | NCR_296 | UAGACCACCCCAAAAAUGAAGGGGACUAAAACACAUUCCG | 65 |
| SARS-Cov-2 | | AAGAACGCUGAA | |
| Cas13a crRNA targeting | NCR_297 | UAGACCACCCCAAAAAUGAAGGGGACUAAAACAUUUCUU | 66 |
| SARS-Cov-2 | | GAACUGUUGCGAC | |
| Cas13a crRNA targeting | NCR_298 | UAGACCACCCCAAAAAUGAAGGGGACUAAAACCCAUUGCC | 67 |
| SARS-Cov-2 | | AGCCAUUCUAGC | |
| Cas13a crRNA targeting | NCR_299 | UAGACCACCCCAAAAAUGAAGGGGACUAAAACGAGCAGCA | 68 |
| SARS-Cov-2 | | UCACCGCCAUUG | |
| Cas13a crRNA targeting | NCR_300 | UAGACCACCCCAAAAAUGAAGGGGACUAAAACUCAAGCA | 69 |
| SARS-Cov-2 | | GCAGCAAAGCAAG | |
| Cas13a crRNA targeting | NCR_301 | UAGACCACCCCAAAAAUGAAGGGGACUAAAACUUUGCCG | 70 |
| SARS-Cov-2 | | AGGCUUCUUAGAA | |
| Cas13a crRNA targeting | NCR_302 | UAGACCACCCCAAAAAUGAAGGGGACUAAAACGCUUGUG | 71 |
| SARS-Cov-2 | | UUACAUUGUAUGC | |
| Cas13a crRNA targeting | NCR_303 | UAGACCACCCCAAAAAUGAAGGGGACUAAAACACUUGAU | 72 |
| SARS-Cov-2 | | CUUUGAAAUUUGG | |
| Cas13a crRNA targeting | NCR_304 | UAGACCACCCCAAAAAUGAAGGGGACUAAAACCAGCAAA | 73 |
| SARS-Cov-2 | | AUGACUUGAUCUU | |
| Cas13a crRNA targeting | NCR_305 | UAGACCACCCCAAAAAUGAAGGGGACUAAAACGUUUCAU | 74 |
| SARS-Cov-2 | | CAGCCUUCUUCUU | |
| Cas13a crRNA targeting | NCR_306 | UAGACCACCCCAAAAAUGAAGGGGACUAAAACGCGGUAA | 75 |
| SARS-Cov-2 | | GGCUUGAGUUUCA | |
| Cas13a crRNA targeting | NCR_307 | UAGACCACCCCAAAAAUGAAGGGGACUAAAACGAAAUCA | 76 |
| SARS-Cov-2 | | UCCAAAUCUGCAG | |
| Cas13a crRNA targeting | NCR_308 | UAGACCACCCCAAAAAUGAAGGGGACUAAAACUAUAUCG | 77 |
| SARS-Cov-2 | | UAAACGGAAAAGC | |
| Cas13a crRNA targeting | NCR_309 | UAGACCACCCCAAAAAUGAAGGGGACUAAAACUAGAUCG | 78 |
| SARS-Cov-2 | | GCGCCGUAACUAU | |
| Cas13a crRNA targeting | NCR_310 | UAGACCACCCCAAAAAUGAAGGGGACUAAAACUCGUCGCC | 79 |
| SARS-Cov-2 | | UAAGUCAAAUGA | |
| Cas13a crRNA targeting | NCR_311 | UAGACCACCCCAAAAAUGAAGGGGACUAAAACCCAGUUU | 80 |
| SARS-Cov-2 | | UCUUGAAAAUCUU | |
| Cas13a crRNA targeting | NCR_312 | UAGACCACCCCAAAAAUGAAGGGGACUAAAACUAACACCA | 81 |
| SARS-Cov-2 | | CUGCUAUGUUUA | |
| Cas13a crRNA targeting | NCR_313 | UAGACCACCCCAAAAAUGAAGGGGACUAAAACCCCCUCCG | 82 |
| SARS-Cov-2 | | UUAAGCUCACGC | |
| Cas13a crRNA targeting | NCR_314 | UAGACCACCCCAAAAAUGAAGGGGACUAAAACCAUAGCG | 83 |
| SARS-Cov-2 | | AGUGUAUGCCCCU | |
| Cas13a crRNA targeting | NCR_315 | UAGACCACCCCAAAAAUGAAGGGGACUAAAACGUCUUUA | 84 |
| SARS-Cov-2 | | AUGCACUCAAGAG | |
| Cas13a crRNA targeting | NCR_316 | JAGACCACCCCAAAAAUGAAGGGGACUAAAACGUUCGGA | 85 |
| SARS-Cov-2 | | CAAAGUGCAUGAA | |

[0273] To test a subset (NCR_273 through NCR_282) of the guide sequences from Table 4, a series of guide RNAs are made by in vitro transcription according to standard protocols. These sequences also comprise the T7 promoter sequence to allow for RPA and RT-LAMP-T7 amplification. Exemplary sequences (NCR_317 through NCR 326) are shown in Table 5 where the underlined portion identifies the T7 promoter sequence. In addition, synthetic primary activator or target sequences are also generated to test the system. Shown in Table 6 are exemplary sequences (NCR 327 through NCR_336) used to test the guide RNAs from Table 5.

TABLE 5
Guide sequences for use with RPA/RT-LAMP-T7

| Name | Sequence 5′-3′ | SEQ ID NO |
|---|---|---|
| NCR_317 | TACACAGGTGCCATCAAATTGTTTTAGTCCCCTTCATTTTTGGGGTGGT | 86 |
| | CTACCTATAGTGAGTCGTATTAATTTCGAC | |
| NCR_318 | AGGTTGGCCACACAGATCTAGTTTTAGTCCCCTTCATTTTTGGGGTGGT | 87 |
| | CTACCTATAGTGAGTCGTATTAATTTCGAC | |
| NCR_319 | TCAGGTTGGACAGCTGGTGCGTTTTAGTCCCCTTCATTTTTGGGGTGGT | 88 |
| | CTACCTATAGTGAGTCGTATTAATTTCGAC | |
| NCR_320 | CTGGTGCTGCAGCTTATTATGTTTTAGTCCCCTTCATTTTTGGGGTGGT | 89 |
| | CTACCTATAGTGAGTCGTATTAATTTCGAC | |
| NCR_321 | GCAGCTTATTATGTGGGTTAGTTTTAGTCCCCTTCATTTTTGGGGTGGT | 90 |
| | CTACCTATAGTGAGTCGTATTAATTTCGAC | |
| NCR_322 | GCTTATTATGTGGGTTATCTGTTTTAGTCCCCTTCATTTTTGGGGTGGTC | 91 |
| | TACCTATAGTGAGTCGTATTAATTTCGAC | |
| NCR_323 | TTATTATGTGGGTTATCTTCGTTTTAGTCCCCTTCATTTTTGGGGTGGTC | 92 |
| | TACCTATAGTGAGTCGTATTAATTTCGAC | |
| NCR_324 | TATTATGTGGGTTATCTTCAGTTTTAGTCCCCTTCATTTTTGGGGTGGTC | 93 |
| | TACCTATAGTGAGTCGTATTAATTTCGAC | |
| NCR_325 | ATTATGTGGGTTATCTTCAAGTTTTAGTCCCCTTCATTTTTGGGGTGGT | 94 |
| | CTACCTATAGTGAGTCGTATTAATTTCGAC | |
| NCR_326 | TTATGTGGGTTATCTTCAACGTTTTAGTCCCCTTCATTTTTGGGGTGGTC | 95 |
| | TACCTATAGTGAGTCGTATTAATTTCGAC | |

TABLE 6
Synthetic primary activator sequences

| Name | Sequence 5′-3′ | SEQ ID NO |
|---|---|---|
| NCR_327 | TCATCCAATTTGATGGCACCTGTGTAGGTCAACCTATAGTGAGTCGTAT | 96 |
| | TAATTTCGAC | |
| NCR_328 | AGCCATTAGATCTGTGTGGCCAACCTCTTCTGCCTATAGTGAGTCGTAT | 97 |
| | TAATTTCGAC | |
| NCR_329 | GCTGCAGCACCAGCTGTCCAACCTGAAGAAGACCTATAGTGAGTCGTA | 98 |
| | TTAATTTCGAC | |
| NCR_330 | ACCCACATAATAAGCTGCAGCACCAGCTGTCCCCTATAGTGAGTCGTA | 99 |
| | TTAATTTCGAC | |
| NCR_331 | TGAAGATAACCCACATAATAAGCTGCAGCACCCCTATAGTGAGTCGTA | 100 |
| | TTAATTTCGAC | |
| NCR_332 | GGTTGAAGATAACCCACATAATAAGCTGCAGCCCTATAGTGAGTCGTA | 101 |
| | TTAATTTCGAC | |
| NCR_333 | TAGGTTGAAGATAACCCACATAATAAGCTGCACCTATAGTGAGTCGTA | 102 |
| | TTAATTTCGAC | |
| NCR_334 | CTAGGTTGAAGATAACCCACATAATAAGCTGCCCTATAGTGAGTCGTA | 103 |
| | TTAATTTCGAC | |
| NCR_335 | CCTAGGTTGAAGATAACCCACATAATAAGCTGCCTATAGTGAGTCGTA | 104 |
| | TTAATTTCGAC | |
| NCR_336 | TCCTAGGTTGAAGATAACCCACATAATAAGCTCCTATAGTGAGTCGTA | 105 |
| | TTAATTTCGAC | |

[0274] Experiments are performed in vitro using the synthetic primary activator sequences and the synthetic crRNAs under conditions described in Example 1 and demonstrate that the NCR system detects the primary activator sequences.

[0275] In some cases, modified reporter molecules are used comprising caging structures to protect the reporter oligo prior to cleavage by a specific activator complexes (e.g. comprising Cas13). Exemplary sequences are shown below in Table 7. “/56-FAM” means the 5′ 6-FAM (Fluorescein) molecule and “/3IABkFQ” is the 3′ Iowa Black© FQ quencher (IDT). The sequences are used with the methods and compositions of the invention and display reduced background signal.

TABLE 7
Reporter sequences

| | | | SEQ ID |
|---|---|---|---|
| Category | Name | Sequence 5′-3′ | NO |
| Cas12 | dGJK_273 | /56-FAM/TTTTTTT/3IABKFQ/ | 106 |
| Reporter | | | |
| Cas13 | NCR_137 | /56-FAM/CGCTCrUrUrUrUrUGAGCG/3IABKFQ/ | 107 |
| Reporter | | | |
| Cas13 | NCR_138 | /56-FAM/CGCTCrUrUrUrUrUrUrUGAGCG/3IABKFQ/ | 108 |
| Reporter | | | |
| Cas13 | NCR_139 | /56-FAM/CGCTCrUrUrUrUrUrUrUrUrUGAGCG/ | 109 |
| Reporter | | 3IABKFQ/ | |
| Cas13 | NCR_140 | /56-FAM/rCrCrCrCrC/3IABKFQ/ | 110 |
| Reporter | | | |
| Cas13 | NCR_141 | /56-FAM/rUrUrUrArA/3IABKFQ/ | 111 |
| Reporter | | | |
| Cas12 | NCR_231 | /56-FAM/TTATTATT/3IABKFQ/ | 112 |
| Reporter | | | |
| Cas13 | rGJK_086 | /56-FAM/rUrUrUrUrU/3IABKFQ/ | 113 |
| Reporter | | | |
| Cas13 | rGJK_087 | /56-FAM/rArArArArA/3IABKFQ/ | 114 |
| Reporter | | | |

[0276] Following demonstration of the system using the synthetic reagents, patient samples are treated per standard protocols. For example, nasopharyngeal swabs are acquired from healthy donors and patients. In some embodiments, saliva samples are obtained. Sample RNA of SARS-CoV-2 is extracted following instructions as described in the CDC EUA-approved protocol (Centers for Disease Control and Prevention. Real-time RT-PCR Panel for Detection 2019-nCoV (US Centers for Disease Control and Prevention, 2020); input 120 μl, elution of 120 μl) using Qiagen DSP Viral RNA Mini kit (Qiagen) and the MagNA Pure 24 instrument (Roche Life Science). In some cases, patient swabs are inserted into specific viral inactivation buffers (e.g. DNA/RNA Shield (Zymo Research) or QuickExtract™ (Lucigen)) or transport buffers (e.g. PBS-Azide). The initial interaction of the Cas13 sensor complex leads to a cleavage event of a caged activator or caged guide molecule which initiates an NCR event. Here, an A₄ activator sequence for Csm6 is included in the hairpin loop of the caged crRNA of the amplifier Cas enzyme, flanked by uracils.

[0277] Additional cleavage events on the loop by Cas13 liberates A₄>P, which bind and activate the RNase activity of TtCsm6. Following activation of the Csm6, it cleaves both the detectable label, as well as the single-stranded hairpin loops of any remaining uncaged crRNA, further activating the NCR.

[0278] Similar experiments are performed using in which the A₄ sequence with flanking U's are be present in the caged crRNA of Cas12, rather than of Cas13 for detection of DNA targets.

[0279] The detectable label may be an F/Q reporter. The fluorescent reporter used could include A's or C's, but also accommodate additional nucleotides necessary for Cas13 (U) or Cas12 (deoxyribonucleotides) activity. This strategy could also be used with Csm6 homologs that respond to A₆>P, like S. epidermidis Csm6 (SeCsm6), by changing the number of A's from four to six in the hairpin loop of the caged crRNA.

### Example 3

[0280] Sequences of proteins that may be used with the methods and compositions of the invention.

Cas13a sequences
LshCas13a, WP_018451595.1 (Abudayyeh, O.O., (2016) Science 353 (6299), aaf5573)

| | |
|---|---|
| 1 | mgnlfghkrw yevrdkkdfk ikrkvkvkrn ydgnkyilni nennnkekid nnkfirkyin |
| 61 | ykkndnilke ftrkfhagni lfklkgkegi iriennddfl eteevvlyie aygkseklka |
| 121 | lgitkkkiid eairqgitkd dkkieikrqe neeeieidir deytnktlnd csiilriien |
| 181 | deletkksiy eifkninmsl ykiiekiien etekvfenry yeehlrekll kddkidvilt |
| 241 | nfmeirekik snleilgfvk fylnvggdkk ksknkkmlve kilninvdlt vediadfvik |
| 301 | elefwnitkr iekvkkvnne flekrrnrty iksyvlldkh ekfkierenk kdkivkffve |
| 361 | niknnsikek iekilaefki delikkleke lkkgncdtei fgifkkhykv nfdskkfskk |
| 421 | sdeekelyki iyrylkgrie kilvneqkvr lkkmekieie kilnesilse kilkrvkqyt |
| 481 | lehimylgkl rhndidmttv ntddfsrlha keeldlelit ffastnmeln kifsreninn |
| 541 | denidffggd reknyvldkk ilnskikiir dldfidnknn itnnfirkft kigtnernri |
| 601 | lhaiskerdl qgtqddynkv iniiqnlkis deevskalnl dvvfkdkkni itkindikis |
| 661 | eennndikyl psfskvlpei lnlyrnnpkn epfdtietek ivlnaliyvn kelykklile |
| 721 | ddleeneskn iflqelkktl gnideideni ienyyknaqi saskgnnkai kkyqkkviec |
| 781 | yigylrknye elfdfsdfkm niqeikkqik dindnktyer itvktsdkti vinddfeyii |
| 841 | sifallnsna vinkirnrff atsvwlntse yqniidilde imqlntlrne citenwnlnl |
| 901 | eefiqkmkei ekdfddfkiq tkkeifnnyy ediknnilte fkddingcdv lekklekivi |
| 961 | fddetkfeid kksnilqdeq rklsninkkd lkkkvdqyik dkdqeikski lcriifnsdf |
| 1021 | lkkykkeidn liedmesene nkfqeiyypk erknelyiyk knlflnignp nfdkiyglis |
| 1081 | ndikmadakf lfnidgknir knkiseidai lknlndklng yskeykekyi kklkenddff |
| 1141 | akniqnknyk sfekdynrvs eykkirdlve fnylnkiesy lidinwklai qmarferdmh |
| 1201 | yivnglrelg iiklsgyntg israypkrng sdgfytttay ykffdeesyk kfekicygfg |
| 1261 | idlsensein kpenesirny ishfyivrnp fadysiaeqi drvsnllsys trynnstyas |
| 1321 | vfevfkkdvn ldydelkkkf klignndile rlmkpkkvsv lelesynsdy iknliiellt |
| 1381 | kientndtl (SEQ ID NO: 115) |

LwaCas13a, WP_021746774.1, hypothetical protein

| | |
|---|---|
| 1 | mkvtkvdgis hkkyieegkl vkstseenrt serlsellsi rldiyiknpd naseeenrir |
| 61 | renlkkffsn kvlhlkdsvl ylknrkekna vqdknyseed iseydlknkn sfsvlkkill |
| 121 | nedvnseele ifrkdveakl nkinslkysf eenkanyqki nennvekvgg kskrniiydy |
| 181 | yresakrndy innvqeafdk lykkediekl fflienskkh ekykireyyh kiigrkndke |
| 241 | nfakiiyeei qnvnnikeli ekipdmselk ksqvfykyyl dkeelndkni kyafchfvei |
| 301 | emsqllknyv ykrlsnisnd kikrifeyqn lkklienkll nkldtyvrnc gkynyylqvg |
| 361 | eiatsdfiar nrqneaflrn iigvssvayf slrnileten enditgrmrg ktvknnkgee |
| 421 | kyvsgevdki ynenkqnevk enlkmfysyd fnmdnkneie dffanideai ssirhgivhf |
| 481 | nlelegkdif afkniapsei skkmfqnein ekklklkifk qlnsanvfny yekdviikyl |
| 541 | kntkfnfvnk nipfvpsftk lynkiedlrn tlkffwsvpk dkeekdaqiy llkniyygef |
| 601 | lnkfvknskv ffkitnevik inkqrnqktg hykyqkfeni ektvpveyla iiqsreminn |
| 661 | qdkeekntyi dfiqqiflkg fidylnknnl kyiesnnnnd nndifskiki kkdnkekydk |
| 721 | ilknyekhnr nkeipheine fvreiklgki lkytenlnmf ylilkllnhk eltnlkgsle |
| 781 | kyqsankeet fsdelelinl lnldnnrvte dfeleaneig kfldfnenki kdrkelkkfd |
| 841 | tnkiyfdgen iikhrafyni kkygmlnlle kiadkakyki slkelkeysn kkneieknyt |
| 901 | mqqnlhrkya rpkkdekfnd edykeyekai gniqkythlk nkvefnelnl 1qglllkilh |
| 961 | rlvgytsiwe rdlrfrlkge fpenhyieei fnfdnsknvk yksgqiveky infykelykd |
| 1021 | nvekrsiysd kkvkklkqek kdlyirnyia hfnyiphaei sllevlenlr kllsydrklk |
| 1081 | naimksivdi lkeygfvatf kigadkkiei qtlesekivh lknlkkkklm tdrnseelce |
| 1141 | lvkvmfeyka le (SEQ ID NO: 116) |

LseCas13a, WP_012985477.1. (Liu, L. et al (2017) Cell 170 (4), 714-726)

| | |
|---|---|
| 1 | mwisiktlih hlgvlffcdy mynrrekkii evktmritkv evdrkkvlis rdknggklvy |
| 61 | enemqdnteq imhhkkssfy ksvvnkticr peqkqmkklv hgllqensqe kikvsdvtkl |
| 121 | nisnflnhrf kkslyyfpen spdkseeyri einlsqlled slkkqqgtfi cwesfskdme |
| 181 | lyinwaenyi ssktklikks irnnriqste srsgqlmdry mkdilnknkp fdiqsvseky |
| 241 | qlekltsalk atfkeakknd keinyklkst lqnherqiie elkenselnq fnieirkhle |
| 301 | tyfpikktnr kvgdirnlei geiqkivnhr lknkivqril qegklasyei estvnsnslq |
| 361 | kikieeafal kfinaclfas nnlrnmvypv ckkdilmige fknsfkeikh kkfirqwsqf |
| 421 | fsqeitvddi elaswglrga iapirneiih lkkhswkkff nnptfkvkks kiingktkdv |
| 481 | tseflyketl fkdyfyseld svpeliinkm esskildyys sdqlnqvfti pnfelsllts |
| 541 | avpfapsfkr vylkgfdyqn qdeaqpdynl klniynekaf nseafqaqys lfkmvyyqvf |
| 601 | lpqfttnndl fkssvdfilt lnkerkgyak afqdirkmnk dekpseymsy iqsqlmlyqk |
| 661 | kqeekekinh fekfinqvfi kgfnsfiekn rltyichptk ntvpendnie ipfhtdmdds |
| 721 | niafwlmckl ldakqlselr nemikfscsl qsteeistft kareviglal lngekgondw |
| 781 | kelfddkeaw kknmslyvse ellqslpytq edgqtpvinr sidlvkkygt etileklfss |
| 841 | sddykvsakd iaklheydvt ekiaqqeslh kqwiekpgla rdsawtkkyq nvindisnyq |
| 901 | waktkveltq vrhlhqltid llsrlagyms iadrdfqfss nyilerense yrvtswills |
| 961 | enknknkynd yelynlknas ikvsskndpq lkvdlkqlrl tleylelfdn rlkekrnnis |
| 1021 | hfnylngqlg nsilelfdda rdvlsydrkl knavskslke ilsshgmevt fkplyqtnhh |
| 1081 | lkidklqpkk ihhlgekstv ssnqvsneyc qlvrtlltmk (SEQ ID NO: 117) |

LbmCas13a, WP_044921188.1 (hypothetical protein)

| | |
|---|---|
| 1 | mqiskvnhkh vavgqkdrer itgfiyndpv gdeksledvv akrandtkvl fnvfntkdly |
| 61 | dsqesdksek dkeiiskgak fvaksinsai tilkkqnkiy stltsqqvik elkdkfggar |
| 121 | iydddieeal tetlkksfrk envrnsikvl ienaagirss lskdeeeliq eyfvkqlvee |
| 181 | ytktklqknv vksiknqnmv iqpdsdsqvl slsesrrekq ssavssdtlv nckekdvlka |
| 241 | fltdyavlde dernsllwkl rnlvnlyfyg sesirdysyt keksvwkehd eqkanktlfi |
| 301 | deichitkig kngkeqkvld yeenrsrcrk qninyyrsal nyaknntsgi fenedsnhfw |
| 361 | ihlienever lyngiengee fkfetgyise kvwkavinhl sikyialgka vynyamkels |
| 421 | spgdiepgki ddsyingits fdyeiikaee slqrdismnv vfatnylaca tvdtdkdfll |
| 481 | fskedirsct kkdgnlckni mqfwggystw knfceeylkd dkdalellys lksmlysmrn |
| 541 | ssfhfstenv dngswdteli gklfeedcnr aariekekfy nnnlhmfyss sllekvlerl |
| 601 | ysshherasq vpsfnrvfvr knfpsslseq ritpkftdsk deqiwqsavy ylckeiyynd |
| 661 | flaskeaykl fregvknldk ndinnqkaad sfkqavvyyg kaignatlsq vcqaimteyn |
| 721 | rqnndglkkk sayaekqnsn kykhyplflk qvlqsafwey ldenkeiygf isaqihksnv |
| 781 | eikaedfian yssqqykklv dkvkktpelq kwytlgrlin prqanqflgs irnyvqfvkd |
| 841 | iqrrakengn pirnyyevle sdsiikilem ctklngttsn dihdyfrded eyaeyisqfv |
| 901 | nfgdvhsgaa lnafcnsese gkkngiyydg inpivnrnwv lcklygspdl iskiisrvne |
| 961 | nmihdfhkqe dlireyqikg icsnkkeqqd lrtfqvlknr velrdiveys eiinelygql |
| 1021 | ikwcylrerd lmyfqlgfhy lclnnasske adyikinvdd rnisgailyq iaamyinglp |
| 1081 | vyykkddmyv alksgkkasd elnsneqtsk kinyflkygn nilgdkkdql ylaglelfen |
| 1141 | vaeheniiif rneidhfhyf ydrdrsmldl ysevfdrfft ydmklrknvv nmlynilldh |
| 1201 | nivssfvfet gekkvgrgds evikpsakir lranngvssd vftykvgskd elkiatlpak |
| 1261 | neefllnvar liyypdmeav senmvregvv kveksndkkg kisrgsntrs snqskynnks |
| 1321 | knrmnysmgs ifekmdlkfd (SEQ ID NO: 118) |

LbnCas13a, WP_022785443.1 (Liu, L. et al, Cell 170 (4), 714-726)

| | |
|---|---|
| 1 | mkiskvreen rgakltvnak tavvsenrsq egilyndpsr ygksrknded rdryiesrlk |
| 61 | ssgklyrifn edknkretde lqwflseivk kinrrnglvl sdmlsvddra fekafekyae |
| 121 | lsytnrrnkv sgspafetcg vdaataerlk giisetnfin riknnidnkv sediidriia |
| 181 | kylkkslcre rvkrglkkll mnafdlpysd pdidvqrdfi dyvledfyhv raksqvsrsi |
| 241 | knmnmpvqpe gdgkfaitvs kggtesgnkr saekeafkkf lsdyaslder vrddmlrrmr |
| 301 | rlvvlyfygs ddsklsdvne kfdvwedhaa rrvdnrefik lplenklang ktdkdaerir |
| 361 | kntvkelyrn qnigcyrqav kaveednngr yfddkmlnmf fihrieygve kiyanlkqvt |
| 421 | efkartgyls ekiwkdliny isikyiamgk avynyamdel nasdkkeiel gkiseeylsg |
| 481 | issfdyelik aeemlqreta vyvafaarhl ssqtveldse nsdflllkpk gtmdkndknk |
| 541 | lasnnilnfl kdketlrdti lqyfgghslw tdfpfdkyla ggkddvdflt dlkdviysmr |
| 601 | ndsfhyaten hnngkwnkel isamfehete rmtvvmkdkf ysnnlpmfyk nddlkkllid |
| 661 | lykdnveras qvpsfnkvfv rknfpalvrd kdnlgieldl kadadkgene lkfynalyym |
| 721 | fkeiyynafl ndknvrerfi tkatkvadny drnkernlkd riksagsdek kklreqlqny |
| 781 | iaendfgqri knivqvnpdy tlaqicqlim teynqqnngc mqkksaarkd inkdsyqhyk |
| 841 | mlllvnlrka flefikenya fvlkpykhdl cdkadfvpdf akyvkpyagl isrvagssel |
| 901 | qkwyivsrfl spaqanhmlg flhsykqyvw diyrrasetg teinhsiaed kiagvditdv |
| 961 | davidlsvkl cgtisseisd yfkddevyae yissyldfey dggnykdsln rfcnsdavnd |
| 1021 | qkvalyydge hpklnrniil sklygerrfl ekitdrvsrs diveyyklkk etsqyqtkgi |
| 1081 | fdsedeqkni kkfqemkniv efrdlmdyse iadelqgqli nwiylrerdl mnfqlgyhya |
| 1141 | clnndsnkqa tyvtldyqgk knrkingail yqicamying lplyyvdkds sewtvsdgke |
| 1201 | stgakigefy ryaksfents dcyasgleif enisehdnit elrnyiehfr yyssfdrsfl |
| 1261 | giysevfdrf ftydlkyrkn vptilynill qhfvnvrfef vsgkkmigid kkdrkiakek |
| 1321 | ecaritirek ngvyseqfty klkngtvyvd ardkrylqsi irllfypekv nmdemievke |
| 1381 | kkkpsdnntg kgyskrdrqq drkeydkyke kkkkegnfls gmggninwde inaqlkn (SEQ |
| | ID NO: 119) |

CamCas13a, WP_031473346.1 (hypothetical protein)

| | |
|---|---|
| 1 | mkfskvdhtr savgiqkatd svhgmlytdp kkqevndldk rfdqlnvkak rlynvfnqsk |
| 61 | aeedddekrf gkvvkklnre lkdllfhrev srynsignak ynyygiksnp eeivsnlgmv |
| 121 | eslkgerdpq kvisklllyy lrkglkpgtd glrmileasc glrklsgdek elkvflqtld |
| 181 | edfekktfkk nlirsienqn mavqpsnegd piigitqgrf nsqkneeksa iermmsmyad |
| 241 | lnedhredvl rklrrlnvly fnvdtektee ptlpgevdtn pvfevwhdhe kgkendrqfa |
| 301 | tfakiltedr etrkkeklav kealndlksa irdhnimayr csikvteqdk dglffedqri |
| 361 | nrfwihhies averilasin peklyklrig ylgekvwkdl lnylsikyia vgkavfhfam |
| 421 | edlgktgqdi elgklsnsvs ggltsfdyeq iradetlqrq lsvevafaan nlfravvgqt |
| 481 | gkkieqskse eneedfllwk aekiaesikk egegntlksi lqffggassw dlnhfcaayg |
| 541 | nessalgyet kfaddlrkai yslrnetfhf ttlnkgsfdw nakligdmfs heaatgiave |
| 601 | rtrfysnnlp mfyresdlkr imdhlyntyh prasqvpsfn svfvrknfrl flsntlntnt |
| 661 | sfdtevyqkw esgvyylfke iyynsflpsg dahhlffegl rrirkeadnl pivgkeakkr |
| 721 | navqdfgrrc delknlslsa icqmimteyn eqnngnrkvk stredkrkpd ifqhykmlll |
| 781 | rtlqeafaiy irreefkfif dlpktlyvmk pveeflpnwk sgmfdslver vkqspdlqrw |
| 841 | yvlckflngr llnqlsgvir syiqfagdiq rrakanhnrl ymdntqrvey ysnvlevvdf |
| 901 | cikgtsrfsn vfsdyfrded ayadyldnyl qfkdekiaev ssfaalktfc neeevkagiy |
| 961 | mdgenpvmqr nivmaklfgp devlknvvpk vtreeieeyy qlekqiapyr qngyckseed |
| 1021 | qkkllrfqri knrvefqtit efseiinell gqliswsflr erdllyfqlg fhylclhndt |
| 1081 | ekpaeykeis redgtvirna ilhqvaamyv gglpvytlad kklaafekge adcklsiskd |
| 1141 | tagagkkikd ffryskyvli kdrmltdqnq kytiylagle lfentdehdn itdvrkyvdh |
| 1201 | fkyyatsden amsildlyse ihdrfftydm kyqknvanml enillrhfvl irpefftgsk |
| 1261 | kvgegkkitc karaqieiae ngmrsedfty klsdgkknis tcmiaardqk ylntvarlly |
| 1321 | ypheakksiv dtrekknnkk tnrgdgtfnk qkgtarkekd ngprefndtg fsntpfagfd |
| 1381 | pfrns (SEQ ID NO: 120) |

CgaCas13a, WP_034560163.1 (hypothetical protein)

| | |
|---|---|
| 1 | mritkvkikl dnklyqvtmq keekygtlkl neesrkstae ilrlkkasfn ksfhsktins |
| 61 | qkenknatik kngdyisqif eklvgvdtnk nirkpkmslt dlkdlpkkdl alfikrkfkn |
| 121 | ddiveiknld lislfynalq kvpgehftde swadfcqemm pyreyknkfi erkiillans |
| 181 | ieqnkgfsin petfskrkrv lhqwaievqe rgdfsildek lsklaeiynf kkmckrvqde |
| 241 | lndleksmkk gknpekekea ykkqknfkik tiwkdypykt higliekike neelnqfnie |
| 301 | igkyfehyfp ikkerctede pyylnsetia ttvnyqlkna lisylmqigk ykqfglenqv |
| 361 | ldskklqeig iyegfqtkfm dacvfatssl kniiepmrsg dilgkrefke aiatssfvny |
| 421 | hhffpyfpfe lkgmkdrese lipfgeqtea kqmqniwalr gsvqqirnei fhsfdknqkf |
| 481 | nlpqldksnf efdasenstg ksqsyietdy kflfeaeknq leqffierik ssgaleyypl |
| 541 | ksleklfakk emkfslgsqv vafapsykkl vkkghsyqta tegtanylgl syynryelke |
| 601 | esfqaqyyll kliyqyvflp nfsqgnspaf retvkailri nkdearkkmk knkkflrkya |
| 661 | feqvremefk etpdqymsyl qsemreekvr kaekndkgfe knitmnfekl lmqifvkgfd |
| 721 | vflttfagke lllsseekvi keteislskk inerektlka siqvehqlva tnsaisywlf |
| 781 | cklldsrhln elrnemikfk qsrikfnhtq haeliqnllp iveltilsnd ydekndsqnv |
| 841 | dvsayfedks lyetapyvqt ddrtrvsfrp ilklekyhtk slieallkdn pqfrvaatdi |
| 901 | qewmhkreei gelvekrknl htewaegqqt lgaekreeyr dyckkidrfn wkankvtlty |
| 961 | lsqlhylitd llgrmvgfsa lferdlvyfs rsfselgget yhisdyknls gvlrlnaevk |
| 1021 | pikiknikvi dneenpykgn epevkpfldr lhaylenvig ikavhgkirn qtahlsvlql |
| 1081 | elsmiesmnn lrdlmaydrk lknavtksmi kildkhgmil klkidenhkn feieslipke |
| 1141 | iihlkdkaik tnqvseeycq lvlallttnp gnqln (SEQ ID NO: 121) |

Cga2Cas13a, WP_034563842.1 (hypothetical protein)

| | |
|---|---|
| 1 | mrmtkvking spvsmnrskl nghlvwngtt ntvniltkke qsfaasflnk tlvkadqvkg |
| 61 | ykvlaenifi ifeqleksns ekpsvylnni rrlkeaglkr ffkskyheei kytseknqsv |
| 121 | ptklnliplf fnavdriqed kfdeknwsyf ckemspyldy kksylnrkke ilansiqqnr |
| 181 | gfsmptaeep nllskrkqlf qqwamkfqes pliqqnnfav eqfnkefank inelaavynv |
| 241 | delctaitek lmnfdkdksn ktrnfeikkl wkqhphnkdk aliklinqeg nealnqfnie |
| 301 | lgkyfehyfp ktgkkesaes yylnpqtiik tvgyqlrnaf vqyllqvgkl hqynkgvlds |
| 361 | qtlqeigmye gfqtkfmdac vfassslrni iqattnedil trekfkkele knvelkhdlf |
| 421 | fkteiveerd enpakkiamt pneldlwair gavqrvrnqi fhqqinkrhe pnqlkvgsfe |
| 481 | ngdlgnvsyq ktiyqklfda eikdieiyfa ekikssgale qysmkdlekl fsnkeltlsl |
| 541 | ggqvvafaps ykklykqgyf yqnektiele qftdydfsnd vfkanyylik liyhyvflpq |
| 601 | fsqannklfk dtvhyviqqn kelnttekdk knnkkirkya feqvklmkne spekymqylq |
| 661 | remqeertik eakktneekp nynfeklliq ifikgfdtfl rnfdlnlnpa eelvgtvkek |
| 721 | aeglrkrker iakilnvdeq iktgdeeiaf wifaklldar hlselrnemi kfkqssvkkg |
| 781 | likngdlieq mqpilelcil sndsesmeke sfdkievfle kvelaknepy mqedkltpvk |
| 841 | frfmkqleky qtrnfienlv ienpefkvse kivlnwheek ekiadlvdkr tklheewask |
| 901 | areieeynek ikknkskkld kpaefakfae ykiiceaien fnrldhkvrl tylknlhylm |
| 961 | idlmgrmvgf svlferdfvy mgrsysalkk qsiylndydt fanirdwevn enkhlfgtss |
| 1021 | sdltfqetae fknlkkpmen qlkallgvtn hsfeirnnia hlhvlrndgk gegvsllscm |
| 1081 | ndlrklmsyd rklknavtka iikildkhgm ilkltnndht kpfeieslkp kkiihleksn |
| 1141 | hsfpmdqvsq eycdlvkkml vftn (SEQ ID NO: 122) |

Pprcas13a, WP_013443710.1 (Liu, L. et al, Cell 170 (4), 714-726)

| | |
|---|---|
| 1 | mrvskvkvkd ggkdkmvlvh rkttgaqlvy sgqpvsnets nilpekkrqs fdlstinkti |
| 61 | ikfdtakkqk lnvdqykive kifkypkqel pkqikaeeil pflnhkfqep vkywkngkee |
| 121 | sfnltllive avqaqdkrkl qpyydwktwy iqtksdllkk siennridlt enlskrkkal |
| 181 | laweteftas gsidlthyhk vymtdvlckm lqdvkpltdd kgkintnayh rglkkalqnh |
| 241 | qpaifgtrev pneanradnq lsiyhlevvk ylehyfpikt skrintaddi ahylkaqtlk |
| 301 | ttiekqlvna iraniiqqgk tnhhelkadt tsndlirikt neafvlnltg tcafaannir |
| 361 | nmvdneqtnd ilgkgdfiks llkdntnsql ysfffgegls tnkaeketql wgirgavqqi |
| 421 | rnnvnhykkd alktvfnisn fenptitdpk qqtnyadtiy karfinelek ipeafaqqlk |
| 481 | tggavsyyti enlksllttf qfslorstip fapgfkkvfn gginyqnakq desfyelmle |
| 541 | qylrkenfae esynaryfml kliynnlflp gfttdrkafa dsvgfvqmqn kkqaekvnpr |
| 601 | kkeayafeav rpmtaadsia dymayvqsel mqeqnkkeek vaeetrinfe kfvlqvfikg |
| 661 | fdsflrakef dfvqmpqpql tatasnqqka dklngleasi tadckltpqy akaddathia |
| 721 | fyvfckllda ahlsnlrnel ikfresvnef kfhhlleiie icllsadvvp tdyrdlysse |
| 781 | adclarlrpf ieqgaditnw sdlfvqsdkh spvihaniel svkygttkll eqiinkdtqf |
| 841 | ktteanftaw ntaqksieql ikqredhheq wvkaknaddk ekqerkreks nfaqkfiekh |
| 901 | gddyldicdy intynwldnk mhfvhlnrlh gltiellgrm agfvalfdrd fqffdeqqia |
| 961 | defklhgfvn lhsidkklne vptkkikeiy dirnkiiqin gnkinesvra nliqfisskr |
| 1021 | nyynnaflhv sndeikekqm ydirnhiahf nyltkdaadf slidlinelr ellhydrklk |
| 1081 | navskafidl fdkhgmilkl klnadhklkv eslepkkiyh lgssakdkpe yqyctnqvmm |
| 1141 | aycnmcrsll emkk (SEQ ID NO: 123) |

LweCas13a, WP_036059185.1 (hypothetical protein)

| | |
|---|---|
| 1 | mlallhqevp sqklhnlksl ntesltklfk pkfqnmisyp pskgaehvqf cltdiavpai |
| 61 | rdldeikpdw giffeklkpy tdwaesyihy kqttiqksie qnkiqspdsp rklvlqkyvt |
| 121 | aflngeplgl dlvakkykla dlaesfkvvd lnedksanyk ikaclqqhqr nildelkedp |
| 181 | elnqygievk kyiqryfpik rapnrskhar adflkkelie stveqqfkna vyhyvleqgk |
| 241 | meayeltdpk tkdlqdirsg eafsfkfina cafasnnlkm ilnpecekdi lgkgdfkknl |
| 301 | pnsttqsdvv kkmipffsde iqnvnfdeai wairgsiqqi rnevyhckkh swksilkikg |
| 361 | fefepnnmky tdsdmqklmd kdiakipdfi eeklkssgii rfyshdklqs iwemkqgfsl |
| 421 | lttnapfvps fkrvyakghd yqtsknryyd lglttfdile ygeedfrary fltklvyyqq |
| 481 | fmpwftadnn afrdaanfvl rlnknrqqda kafinireve egemprdymg yvqgqiaihe |
| 541 | dstedtpnhf ekfisqvfik gfdshmrsad lkfiknprnq gleqseieem sfdikvepsf |
| 601 | lknkddyiaf wtfckmldar hlselrnemi kydghltgeq eiiglallgv dsrendwkqf |
| 661 | fssereyeki mkgyvgeely qrepyrqsdg ktpilfrgve qarkygtetv iqrlfdaspe |
| 721 | fkvskcnite werqketiee tierrkelhn eweknpkkpq nnaffkeyke ccdaidaynw |
| 781 | hknkttlvyv nelhhlliei lgryvgyvai adrdfqcman qyfkhsgite rveywgdnrl |
| 841 | ksikkldtfl kkeglfvsek narnhiahln ylslksectl lylserlrei fkydrklkna |
| 901 | vskslidild rhgmsvvfan lkenkhrlvi kslepkklrh lgekkidngy ietnqvseey |
| 961 | cgivkrllei (SEQ ID NO: 124) |

LneCas13a, WP_036091002.1 (hypothetical protein)

| | |
|---|---|
| 1 | mkitkmrvdg rtivmertsk egqlgyegid gnktteiifd kkkesfyksi lnktvrkpde |
| 61 | keknrrkqai nkainkeite lmlavlhqev psqklhnlks lntesltklf kpkfqnmisy |
| 121 | ppskgaehvq fcltdiavpa irdldeikpd wgiffeklkp ytdwaesyih ykqttiqksi |
| 181 | eqnkiqspds prklvlqkyv taflngeplg ldlvakkykl adlaesfklv dlnedksany |
| 241 | kikaclqqhq rnildelked pelnqygiev kkyiqryfpi krapnrskha radflkkeli |
| 301 | estveqqfkn avyhyvleqg kmeayeltdp ktkdlqdirs geafsfkfin acafasnnlk |
| 361 | milnpecekd ilgkgnfkkn lpnsttrsdv vkkmipffsd elqnvnfdea iwairgsiqq |
| 421 | irnevyhckk hswksilkik gfefepnnmk yadsdmqklm dkdiakipef ieeklkssgv |
| 481 | vrfyrhdelq siwemkqgfs llttnapfvp sfkrvyakgh dyqtsknryy nldlttfdil |
| 541 | eygeedfrar yfltklvyyq qfmpwftadn nafrdaanfv lrlnknrqqd akafinirev |
| 601 | eegemprdym gyvqgqiaih edsiedtpnh fekfisqvfi kgfdrhmrsa nlkfiknprn |
| 661 | qgleqseiee msfdikveps flknkddyia fwifckmlda rhlselrnem ikydghltge |
| 721 | qeiiglallg vdsrendwkq ffssereyek imkgyvveel yqrepyrqsd gktpilfrgv |
| 781 | eqarkygtet viqrlfdanp efkvskonla ewerqketie etikrrkelh newaknpkkp |
| 841 | qnnaffkeyk eccdaidayn whknkttlay vnelhhllie ilgryvgyva iadrdfqcma |
| 901 | nqyfkhsgit erveywgdnr lksikkldtf lkkeglfvse knarnhiahl nylslksect |
| 961 | llylserlre ifkydrklkn avskslidil drhgmsvvfa nlkenkhrlv ikslepkklr |
| 1021 | hlggkkidgg yietnqvsee ycgivkrlle m (SEQ ID NO: 125) |

Lwa2cas13a, WP_021746774.1 (hypothetical protein)

| | |
|---|---|
| 1 | mkvtkvdgis hkkyieegkl vkstseenrt serlsellsi rldiyiknpd naseeenrir |
| 61 | renlkkffsn kvlhlkdsvl ylknrkekna vqdknyseed iseydlknkn sfsvlkkill |
| 121 | nedvnseele ifrkdveakl nkinslkysf eenkanyqki nennvekvgg kskrniiydy |
| 181 | yresakrndy innvqeafdk lykkediekl fflienskkh ekykireyyh kiigrkndke |
| 241 | nfakiiyeei qnvnnikeli ekipdmselk ksqvfykyyl dkeelndkni kyafchfvei |
| 301 | emsqllknyv ykrlsnisnd kikrifeyqn lkklienkll nkldtyvrnc gkynyylqvg |
| 361 | eiatsdfiar nrqneaflrn iigvssvayf slrnileten enditgrmrg ktvknnkgee |
| 421 | kyvsgevdki ynenkqnevk enlkmfysyd fnmdnkneie dffanideai ssirhgivhf |
| 481 | nlelegkdif afkniapsei skkmfqnein ekklklkifk qlnsanvfny yekdviikyl |
| 541 | kntkfnfunk nipfvpsftk lynkiedlrn tlkffwsvpk dkeekdaqiy llkniyygef |
| 601 | lnkfvknskv ffkitnevik inkqrnqktg hykyqkfeni ektvpveyla iiqsreminn |
| 661 | qdkeekntyi dfiqqiflkg fidylnknnl kyiesnnnnd nndifskiki kkdnkekydk |
| 721 | ilknyekhnr nkeipheine fvreiklgki lkytenlnmf ylilkllnhk eltnlkgsle |
| 781 | kyqsankeet fsdelelinl lnldnnrvte dfeleaneig kfldfnenki kdrkelkkfd |
| 841 | tnkiyfdgen iikhrafyni kkygmlnlle kiadkakyki slkelkeysn kkneieknyt |
| 901 | mqqnlhrkya rpkkdekfnd edykeyekai gniqkythlk nkvefnelnl lqglllkilh |
| 961 | rlvgytsiwe rdlrfrlkge fpenhyieei fnfdnsknvk yksgqiveky infykelykd |
| 1021 | nvekrsiysd kkvkklkqek kdlyirnyia hfnyiphaei sllevlenlr kllsydrklk |
| 1081 | naimksivdi lkeygfvatf kigadkkiei qtlesekivh lknlkkkklm tdrnseelce |
| 1141 | lvkvmfeyka le (SEQ ID NO: 126) |

RcsCas13a, WP_013067728.1 (hypothetical protein)

| | |
|---|---|
| 1 | mqigkvqgrt isefgdpagg lkrkistdgk nrkelpahls sdpkaligqw isgidkiyrk |
| 61 | pdsrksdgka ihsptpskmq fdarddlgea fwklvseagl aqdsdydqfk rrlhpygdkf |
| 121 | qpadsgaklk feadppepqa fhgrwygams krgndakela aalyehlhvd ekridgqpkr |
| 181 | npktdkfapg lvvaralgie ssvlprgmar larnwgeeei qtyfvvdvaa svkevakaav |
| 241 | saaqafdppr qvsgrslspk vgfalaehle rvtgskrcsf dpaagpsvla lhdevkktyk |
| 301 | rlcargknaa rafpadktel lalmrhthen rvrnqmvrmg rvseyrgqqa gdlaqshywt |
| 361 | sagqteikes eifvrlwvga falagrsmka widpmgkivn tekndrdlta avnirqvisn |
| 421 | kemvaeamar rgiyfgetpe ldrlgaegne gfvfallryl rgernqtfhl garagflkei |
| 481 | rkelektrwg kakeaehvvl tdktvaaira iidndakalg arlladlsga fvahyaskeh |
| 541 | fstlyseivk avkdapevss glprlklllk radgvrgyvh glrdtrkhaf atklppppap |
| 601 | relddpatka ryiallrlyd gpfrayasgi tgtalagpaa rakeaatala qsvnvtkays |
| 661 | dvmegrtsrl rppndgetlr eylsaltget atefrvqigy esdsenarkq aefienyrrd |
| 721 | mlafmfedyi rakgfdwilk iepgatamtr apvlpepidt rgqyehwqaa lylvmhfvpa |
| 781 | sdvsnllhql rkwealqgky elvqdgdatd qadarreald lvkrfrdvlv lflktgearf |
| 841 | egraapfdlk pfralfanpa tfdrlfmatp ttarpaeddp egdgasepel rvartlrglr |
| 901 | qiarynhmav lsdlfakhkv rdeevarlae iedetqeksq ivaaqelrtd lhdkvmkchp |
| 961 | ktispeerqs yaaaiktiee hrflvgrvyl gdhlrlhrlm mdvigrlidy agayerdtgt |
| 1021 | flinaskqlg agadwavtia gaantdartq trkdlahfnv ldradgtpdl talvnrarem |
| 1081 | maydrkrkna vprsildmla rlgltlkwqm kdhllqdati tqaaikhldk vrltvggpaa |
| 1141 | vtearfsqdy lqmvaavfng svqnpkprrr ddgdawhkpp kpataqsqpd qkppnkapsa |
| 1201 | gsrlpppqvg evyegvvvkv idtgslgfla vegvagnigl hisrlrrire daiivgrryr |
| 1261 | frveiyvppk sntsklnaad lvrid (SEQ ID NO: 127) |

RcrCas13a, WP_023911507.1 (hypothetical protein)

| | |
|---|---|
| 1 | mqigkvqgrt isefgdpagg lkrkistdgk nrkelpahls sdpkaligqw isgidkiyrk |
| 61 | pdsrksdgka ihsptpskmq fdarddlgea fwklvseagl aqdsdydqfk rrlhpygdkf |
| 121 | qpadsgaklk feadppepqa fhgrwygams krgndakela aalyehlhvd ekridgqpkr |
| 181 | npktdkfapg lvvaralgie ssvlprgmar larnwgeeei qtyfvvdvaa svkevakaav |
| 241 | saaqafdppr qvsgrslspk vgfalaehle rvtgskrcsf dpaagpsvla lhdevkktyk |
| 301 | rlcargknaa rafpadktel lalmrhthen rvrnqmvrmg rvseyrgqqa gdlaqshywt |
| 361 | sagqteikes eifvrlwvga falagrsmka widpmgkivn tekndrdlta avnirqvisn |
| 421 | kemvaeamar rgiyfgetpe ldrlgaegne gfvfallryl rgcrnqtfhl garagflkei |
| 481 | rkelektrwg kakeaehvvl tdktvaaira iidndakalg arlladlsga fvahyaskeh |
| 541 | fstlyseivk avkdapevss glprlklllk radgvrgyvh glrdtrkhaf atklppppap |
| 601 | relddpatka ryiallrlyd gpfrayasgi tgtalagpaa rakeaatala qsvnvtkays |
| 661 | dvmegrssrl rppndgetlr eylsaltget atefrvqigy esdsenarkq aefienyrrd |
| 721 | mlafmfedyi rakgfdwilk iepgatamtr apvlpepidt rgqyehwqaa lylvmhfvpa |
| 781 | sdvsnllhql rkwealqgky elvqdgdatd qadarreald lvkrfrdvlv lflktgearf |
| 841 | egraapfdlk pfralfanpa tfdrlfmatp ttarpaeddp egdgasepel rvartlrglr |
| 901 | qiarynhmav lsdlfakhkv rdeevarlae iedetqeksq ivaaqelrtd lhdkvmkchp |
| 961 | ktispeerqs yaaaiktiee hrflvgrvyl gdhlrlhrlm mdvigrlidy agayerdtgt |
| 1021 | flinaskqlg agadwavtia gaantdartq trkdlahfnv ldradgtpdl talvnrarem |
| 1081 | maydrkrkna vprsildmla rlgltlkwqm kdhllqdati tqaaikhldk vrltvggpaa |
| 1141 | vtearfsqdy lqmvaavfng svqnpkprrr ddgdawhkpp kpataqsqpd qkppnkapsa |
| 1201 | gsrlpppqvg evyegvvvkv idtgslgfla vegvagnigl hisrlrrire daiivgrryr |
| 1261 | frveiyvppk sntsklnaad lvrid (SEQ ID NO: 128) |

RcdCas13a, WP_023911507.1 (hypothetical protein)

| | |
|---|---|
| 1 | mqigkvqgrt isefgdpagg lkrkistdgk nrkelpahls sdpkaligqw isgidkiyrk |
| 61 | pdsrksdgka ihsptpskmq fdarddlgea fwklvseagl aqdsdydqfk rrlhpygdkf |
| 121 | qpadsgaklk feadppepqa fhgrwygams krgndakela aalyehlhvd ekridgqpkr |
| 181 | npktdkfapg lvvaralgie ssvlprgmar larnwgeeei qtyfvvdvaa svkevakaav |
| 241 | saaqafdppr qvsgrslspk vgfalaehle rvtgskrcsf dpaagpsvla lhdevkktyk |
| 301 | rlcargknaa rafpadktel lalmrhthen rvrnqmvrmg rvseyrgqqa gdlaqshywt |
| 361 | sagqteikes eifvrlwvga falagrsmka widpmgkivn tekndrdlta avnirqvisn |
| 421 | kemvaeamar rgiyfgetpe ldrlgaegne gfvfallryl rgcrnqtfhl garagflkei |
| 481 | rkelektrwg kakeaehvvl tdktvaaira iidndakalg arlladlsga fvahyaskeh |
| 541 | fstlyseivk avkdapevss glprlklllk radgvrgyvh glrdtrkhaf atklppppap |
| 601 | relddpatka ryiallrlyd gpfrayasgi tgtalagpaa rakeaatala qsvnvtkays |
| 661 | dvmegrssrl rppndgetlr eylsaltget atefrvqigy esdsenarkq aefienyrrd |
| 721 | mlafmfedyi rakgfdwilk iepgatamtr apvlpepidt rgqyehwqaa lylvmhfvpa |
| 781 | sdvsnllhql rkwealqgky elvqdgdatd qadarreald lvkrfrdvlv lflktgearf |
| 841 | egraapfdlk pfralfanpa tfdrlfmatp ttarpaeddp egdgasepel rvartlrglr |
| 901 | qiarynhmav lsdlfakhkv rdeevarlae iedetqeksq ivaaqelrtd lhdkvmkchp |
| 961 | ktispeerqs yaaaiktiee hrflvgrvyl gdhlrlhrlm mdvigrlidy agayerdtgt |
| 1021 | flinaskqlg agadwavtia gaantdartq trkdlahfnv ldradgtpdl talvnrarem |
| 1081 | maydrkrkna vprsildmla rlgltlkwqm kdhllqdati tqaaikhldk vrltvggpaa |
| 1141 | vtearfsqdy lqmvaavfng svqnpkprrr ddgdawhkpp kpataqsqpd qkppnkapsa |
| 1201 | gsrlpppqvg evyegvvvkv idtgslgfla vegvagnigl hisrlrrire daiivgrryr |
| 1261 | frveiyvppk sntsklnaad lvrid (SEQ ID NO: 129) |

LbuCas13a, WP_015770004, (Liu, L. et al, Cell 170 (4), 714-726)

| | |
|---|---|
| 1 | mkvtkvggis hkkytsegrl vkseseenrt derlsallnm rldmyiknps stetkenqkr |
| 61 | igklkkffsn kmvylkdntl slkngkkeni dreysetdil esdvrdkknf avlkkiylne |
| 121 | nvnseelevf rndikkklnk inslkysfek nkanyqkine nniekvegks krniiydyyr |
| 181 | esakrdayvs nvkeafdkly keediaklvl eienltklek ykirefyhei igrkndkenf |
| 241 | akiiyeeiqn vnnmkeliek vpdmselkks qvfykyyldk eelndkniky afchfveiem |
| 301 | sqllknyvyk rlsnisndki krifeyqnlk klienklink ldtyvrncgk ynyylqdgei |
| 361 | atsdfiarnr qneaflrnii gvssvayfsl rniletenen ditgrmrgkt vknnkgeeky |
| 421 | vsgevdkiyn enkknevken 1kmfysydfn mdnkneiedf fanideaiss irhgivhfnl |
| 481 | elegkdifaf kniapseisk kmfqneinek klklkifrql nsanvfryle kykilnylkr |
| 541 | trfefvnkni pfvpsftkly sriddlknsl giywktpktn ddnktkeiid aqiyllkniy |
| 601 | ygeflnyfms nngnffeisk eiielnkndk rnlktgfykl qkfediqeki pkeylaniqs |
| 661 | lyminagnqd eeekdtyidf iqkiflkgfm tylanngrls liyigsdeet ntslaekkqe |
| 721 | fdkflkkyeq nnnikipyei neflreiklg nilkyterln mfylilklln hkeltnlkgs |
| 781 | lekyqsanke eafsdqleli nllnldnnrv tedfeleade igkfldfngn kvkdnkelkk |
| 841 | fdtnkiyfdg eniikhrafy nikkygmlnl lekiadkagy kisieelkky snkkneiekn |
| 901 | hkmqenlhrk yarprkdekf tdedyesykq aienieeyth lknkvefnel nllqglllri |
| 961 | lhrlvgytsi werdlrfrlk gefpenqyie eifnfenkkn vkykggqive kyikfykelh |
| 1021 | qndevkinky ssanikvlkq ekkdlyirny iahfnyipha eisllevlen lrkllsydrk |
| 1081 | lknavmksvv dilkeygfva tfkigadkki giqtleseki vhlknlkkkk lmtdrnseel |
| 1141 | cklvkimfey kmeekksen (SEQ ID NO: 130) |

RcaCas13a, ETD76934.1 (Ding, H. et al (2014) Genome Announc 2 (1), e00050-14)

| | |
|---|---|
| 1 | mqigkvqgrt isefgdpagg lkrkistdgk nrkelpahls sdpkaligqw isgidkiyrk |
| 61 | pdsrksdgka ihsptpskmq fdarddlgea fwklvseagl aqdsdydqfk rrlhpygdkf |
| 121 | qpadsgaklk feadppepqa fhgrwygams krgndakela aalyehlhvd ekridgqpkr |
| 181 | npktdkfapg lvvaralgie ssvlprgmar larnwgeeei qtyfvvdvaa svkevakaav |
| 241 | saaqafdppr qvsgrslspk vgfalaehle rvtgskrcsf dpaagpsvla lhdevkktyk |
| 301 | rlcargknaa rafpadktel lalmrhthen rvrnqmvrmg rvseyrgqqa gdlaqshywt |
| 361 | sagqteikes eifvrlwvga falagrsmka widpmgkivn tekndrdlta avnirqvisn |
| 421 | kemvaeamar rgiyfgetpe ldrlgaegne gfvfallryl rgernqtfhl garagflkei |
| 481 | rkelektrwg kakeaehvvl tdktvaaira iidndakalg arlladlsga fvahyaskeh |
| 541 | fstlyseivk avkdapevss glprlklllk radgvrgyvh glrdtrkhaf atklppppap |
| 601 | relddpatka ryiallrlyd gpfrayasgi tgtalagpaa rakeaatala qsvnvtkays |
| 661 | dvmegrssrl rppndgetlr eylsaltget atefrvqigy esdsenarkq aefienyrrd |
| 721 | mlafmfedyi rakgfdwilk iepgatamtr apvlpepidt rgqyehwqaa lylvmhfvpa |
| 781 | sdvsnllhql rkwealqgky elvqdgdatd qadarreald lvkrfrdvlv lflktgearf |
| 841 | egraapfdlk pfralfanpa tfdrlfmatp ttarpaeddp egdgasepel rvartlrglr |
| 901 | qiarynhmav lsdlfakhkv rdeevarlae iedetqeksq ivaagelrtd lhdkvmkchp |
| 961 | ktispeerqs yaaaiktiee hrflvgrvyl gdhlrlhrlm mdvigrlidy agayerdtgt |
| 1021 | flinaskqlg agadwavtia gaantdartq trkdlahfnv ldradgtpdl talvnrarem |
| 1081 | maydrkrkna vprsildmla rlgltlkwqm kdhllqdati tqaaikhldk vrltvggpaa |
| 1141 | vtearfsqdy lqmvaavfng svqnpkprrr ddgdawhkpp kpataqsqpd qkppnkapsa |
| 1201 | gsrlpppqvg evyegvvvkv idtgslgfla vegvagnigl hisrlrrire daiivgrryr |
| 1261 | frveiyvppk sntsklnaad lvrid (SEQ ID NO: 131) |

EreCas13a, WP_055061018.1 (hypothetical protein)

| | |
|---|---|
| 1 | mlrrdkevkk lynvfnqiqv gtkpkkwnnd eklspeener raqqknikmk nykwreacsk |
| 61 | yvessqriin dvifysyrka knklrymrkn edilkkmqea eklskfsggk ledfvaytlr |
| 121 | kslvvskydt qefdslaamv vflecigknn isdhereivc kllelirkdf skldpnvkgs |
| 181 | qganivrsvr nonmivqpqg drflfpqvya kenetvtnkn vekeglnefl lnyanlddek |
| 241 | raeslrklrr ildvyfsapn hyekdmditl sdniekekfn vwekhecgkk etglfvdipd |
| 301 | vlmeaeaeni kldavvekre rkvlndrvrk qniicyrytr avvekynsne plffennain |
| 361 | qywihhiena verilkncka gklfklrkgy laekvwkdai nlisikyial gkavynfald |
| 421 | diwkdkknke lgivderirn gitsfdyemi kahenlqrel avdiafsvnn laravcdmsn |
| 481 | lgnkesdfll wkrndiadkl knkddmasvs avlqffggks swdinifkda ykgkkkynye |
| 541 | vrfiddlrka iycarnenfh fktalvndek wntelfgkif eretefclnv ekdrfysnnl |
| 601 | ymfyqvselr nmldhlysrs vsraaqvpsy nsvivrtafp eyitnvlgyq kpsydadtlg |
| 661 | kwysacyyll keiyynsflq sdralqlfek svktlswddk kqqravdnfk dhfsdiksac |
| 721 | tslaqvcqiy mteynqqnnq ikkvrssnds ifdqpvyqhy kvllkkaian afadylknnk |
| 781 | dlfgfigkpf kaneireidk eqflpdwtsr kyealcievs gsqelqkwyi vgkflnarsl |
| 841 | nlmvgsmrsy iqyvtdikrr aasignelhv svhdvekvek wvqvievcsl lasrtsnqfe |
| 901 | dyfndkddya rylksyvdfs nvdmpseysa lvdfsneeqs dlyvdpknpk vnrnivhskl |
| 961 | faadhilrdi vepvskdnie efysqkaeia yckikgkeit aeeqkavlky qklknrvelr |
| 1021 | diveygeiin ellgqlinws fmrerdllyf qlgfhydclr ndskkpegyk nikvdensik |
| 1081 | dailyqiigm yvngvtvyap ekdgdklkeq cvkggvgvkv safhryskyl glnektlyna |
| 1141 | gleifevvae hediinling idhfkyylgd yrsmlsiyse vfdrfftydi kyqknvlnll |
| 1201 | qnillrhnvi vepilesgfk tigeqtkpga klsirsiksd tfqykvkggt litdakdery |
| 1261 | letirkilyy aeneednlkk svvvtnadky eknkesddqn kqkekknkdn kgkkneetks |
| 1321 | daeknnnerl synpfanlnf klsn (SEQ ID NO: 132) |

HheCas13a, CRZ35554.1 (Wibberg, Daniel, direct submission)

| | |
|---|---|
| 1 | mkltrrrisg nsvdqkitaa fyrdmsqgll yydsedndct dkviesmdfe rswrgrilkn |
| 61 | geddknpfym fvkglvgsnd kivcepidvd sdpdnldili nknltgfgrn lkapdsndtl |
| 121 | enlirkiqag ipeeevlpel kkikemiqkd ivnrkeqllk siknnripfs legsklvpst |
| 181 | kkmkwlfkli dvpnktfnek mlekyweiyd ydklkanitn rldktdkkar sisravseel |
| 241 | reyhknlrtn ynrfvsgdrp aagldnggsa kynpdkeefl lflkeveqyf kkyfpvkskh |
| 301 | snkskdkslv dkyknycsyk vvkkevnrsi inqlvagliq qgkllyyfyy ndtwqedfln |
| 361 | syglsyiqve eafkksvmts lswginrlts ffiddsntvk fddittkkak eaiesnyfnk |
| 421 | lrtcsrmqdh fkeklaffyp vyvkdkkdrp dddienlivl vknaiesvsy lrnrtfhfke |
| 481 | ssllellkel ddknsgqnki dysvaaefik rdienlydvf reqirslgia eyykadmisd |
| 541 | cfktcglefa lyspknslmp afknvykrga nlnkayirdk gpketgdqgq nsykaleeyr |
| 601 | eltwyievkn ndqsynaykn llqliyyhaf lpevreneal itdfinrtke wnrketeerl |
| 661 | ntknnkkhkn fdendditvn tyryesipdy qgeslddylk vlqrkqmara kevnekeegn |
| 721 | nnyiqfirdv vvwafgayle nklknyknel qpplskenig lndtlkelfp eekvkspfni |
| 781 | kcrfsistfi dnkgkstdnt saeavktdgk edekdkknik rkdllcfylf lrlldeneic |
| 841 | klqhqfikyr cslkerrfpg nrtklekete llaeleelme lvrftmpsip eisakaesgy |
| 901 | dtmikkyfkd fiekkvfknp ktsnlyyhsd sktpvtrkym allmrsaplh lykdifkgyy |
| 961 | litkkecley iklsniikdy qnslnelheq leriklksek qngkdslyld kkdfykvkey |
| 1021 | venleqvary khlqhkinfe slyrifrihv diaarmvgyt qdwerdmhfl fkalvyngvl |
| 1081 | eerrfeaifn nnddnndgri vkkiqnnlnn knrelvsmlc wnkklnknef gaiiwkrnpi |
| 1141 | ahlnhftqte qnsksslesl inslrillay drkrqnavtk tindllindy hirikwegrv |
| 1201 | degqiyfnik ekedienepi ihlkhlhkkd cyiyknsymf dkqkewicng ikeevydksi |
| 1261 | lkcignlfkf dyedknkssa npkht (SEQ ID NO: 133) |

LbaCas13a, WP_022785443.1 ((Liu, L. et al, Cell 170 (4), 714-726

| | |
|---|---|
| 1 | mkiskvreen rgakltvnak tavvsenrsq egilyndpsr ygksrknded rdryiesrlk |
| 61 | ssgklyrifn edknkretde lqwflseivk kinrrnglvl sdmlsvddra fekafekyae |
| 121 | lsytnrrnkv sgspafetcg vdaataerlk giisetnfin riknnidnkv sediidriia |
| 181 | kylkkslcre rvkrglkkll mnafdlpysd pdidvqrdfi dyvledfyhv raksqvsrsi |
| 241 | knmnmpvqpe gdgkfaitvs kggtesgnkr saekeafkkf lsdyaslder vrddmlrrmr |
| 301 | rlvvlyfygs ddsklsdvne kfdvwedhaa rrvdnrefik lplenklang ktdkdaerir |
| 361 | kntvkelyrn qnigcyrqav kaveednngr yfddkmlnmf fihrieygve kiyanlkqvt |
| 421 | efkartgyls ekiwkdliny isikyiamgk avynyamdel nasdkkeiel gkiseeylsg |
| 481 | issfdyelik aeemlqreta vyvafaarhl ssqtveldse nsdflllkpk gtmdkndknk |
| 541 | lasnnilnfl kdketlrdti lqyfgghslw tdfpfdkyla ggkddvdflt dlkdviysmr |
| 601 | ndsfhyaten hnngkwnkel isamfehete rmtvvmkdkf ysnnlpmfyk nddlkkllid |
| 661 | lykdnveras qvpsfnkvfv rknfpalvrd kdnlgieldl kadadkgene lkfynalyym |
| 721 | fkeiyynafl ndknvrerfi tkatkvadny drnkernlkd riksagsdek kklreqlqny |
| 781 | iaendfgqri knivqvnpdy tlaqicqlim teynqqnngc mqkksaarkd inkdsyqhyk |
| 841 | mlllvnlrka flefikenya fvlkpykhdl cdkadfvpdf akyvkpyagl isrvagssel |
| 901 | qkwyivsrfl spaqanhmlg flhsykqyvw diyrrasetg teinhsiaed kiagvditdv |
| 961 | davidlsvkl cgtisseisd yfkddevyae yissyldfey dggnykdsln rfcnsdavnd |
| 1021 | qkvalyydge hpklnrniil sklygerrfl ekitdrvsrs diveyyklkk etsqyqtkgi |
| 1081 | fdsedeqkni kkfqemkniv efrdlmdyse iadelqgqli nwiylrerdl mnfqlgyhya |
| 1141 | clnndsnkqa tyvtldyqgk knrkingail yqicamying lplyyvdkds sewtvsdgke |
| 1201 | stgakigefy ryaksfents dcyasgleif enisehdnit elrnyiehfr yyssfdrsfl |
| 1261 | giysevfdrf ftydlkyrkn vptilynill qhfvnvrfef vsgkkmigid kkdrkiakek |
| 1321 | ecaritirek ngvyseqfty klkngtvyvd ardkrylqsi irllfypekv nmdemievke |
| 1381 | kkkpsdnntg kgyskrdrqq drkeydkyke kkkkegnfls gmggninwde inaqlkn (SEQ |
| | ID NO: 269) |

Cas13d
[Eubacterium] siraeum DSM 15702 ESCas13d

| | |
|---|---|
| 1 | mgkkihardl reqrktdrte kfadqnkkre aeravpkkda avsvksvssv sskkdnvtks |
| 61 | makaagvksv favgntvymt sfgrgndavl eqkivdtshe plniddpayq lnvvtmngys |
| 121 | vtghrgetvs avtdnplrrf ngrkkdepeq svptdmlclk ptlekkffgk efddnihiql |
| 181 | iynildieki lavystnaiy alnnmsaden iensdffmkr ttdetfddfe kkkestnsre |
| 241 | kadfdafekf ignyrlayfa dafyvnkknp kgkaknvlre dkelysvltl igklahwcva |
| 301 | seegraefwl ykldelkddf knvldvvynr pveeinnrfi ennkvniqil gsvykntdia |
| 361 | elvrsyyefl itkkyknmgf sikklresml egkgyadkey dsvrnklyqm tdfilytgyi |
| 421 | nedsdraddl vntlrsslke ddkttvycke adylwkkyre sirevadald gdnikklsks |
| 481 | nieiqedklr kcfisyadsv seftkliyll trflsgkein dlvttlinkf dnirsfleim |
| 541 | delgldrtft aeysffegst kylaelveln sfvkscsfdi nakrtmyrda ldilgiesdk |
| 601 | teediekmid nilqidangd kklkknnglr nfiasnvids nrfkylvryg npkkiretak |
| 661 | ckpavrfvln eipdaqiery yeaccpknta lcsankrrek ladmiaeikf enfsdagnyq |
| 721 | kanvtsrtse aeikrknqai irlyltvmyi mlknlvnvna ryviafhcve rdtklyaesg |
| 781 | levgnieknk tnltmavmgv klengiikte fdksfaenaa nrylrnarwy klildnlkks |
| 841 | eravvnefan tvcalnairn ininikeike venyfalyhy liqkhlenrf adkkverdtg |
| 901 | dfiskleehk tyckdfvkay ctpfgynlvr yknltidglf dknypgkdds deqk. (SEQ ID |
| | NO: 134) |

uncultured Ruminococcus sp. URCas13d (PDB: 6IV9_A)

| | |
|---|---|
| 1 | makknkmkpr elreaqkkar qlkaaeinnn aapaiaampa aeviapvaek kkssvkaagm |
| 61 | ksilvsenkm yitsfgkgns avleyevdnn dynktqlssk dnsnielgdv nevnitfssk |
| 121 | hgfgsgvein tsnpthrsge sspvrgdmlg lkselekrff gktfddnihi qliynildie |
| 181 | kilavyvtni vyalnnmlgi kdsesyddfm gylsarntye vfthpdksnl sdkvkgnikk |
| 241 | slskfndllk tkrlgyfgle epktkdtras eaykkrvyhm laivgqiaqc vfhdksgakr |
| 301 | fdlysfinni dpeyrdtldy lveerlksin kdfiegnkvn isllidmmkg yeaddiirly |
| 361 | ydfivlksqk nlgfsikklr ekmleeygfr fkdkqydsvr skmyklmdfl 1fcnyyrndv |
| 421 | aagealvrkl rfsmtddeke giyadeaakl wgkfrndfen iadhmngdvi kelgkadmdf |
| 481 | dekildsekk nasdllyfsk miymltyfld gkeindlltt liskfdnike flkimkssav |
| 541 | dveceltagy klfndsqrit nelfivknia smrkpaasak ltmfrdalti lgiddnitdd |
| 601 | riseilklke kgkgihglrn fitnnviess rfvylikyan aqkirevakn ekvvmfvlgg |
| 661 | ipdtqieryy kscvefpdmn ssleakrsel armiknisfd dfknvkqqak grenvakera |
| 721 | kaviglyltv myllvknlvn vnaryviaih clerdfglyk eiipelaskn lkndyrilsq |
| 781 | tlcelcddrn essnlflkkn krlrkcvevd innadssmtr kyanciahlt vvrelkeyig |
| 841 | dirtvdsyfs iyhyvmqrci tkrgddtkqe ekikyeddll knhgytkdfv kalnspfgyn |
| 901 | iprfknlsie qlfdrneylt eklehhhhhh (SEQ ID NO: 135) |

Cas12a sequences
Lachnospiraceae bacterium (LbCas12a)
MSKLEKFTNCYSLSKTLRFKAIPVGKTQENIDNKRLLVEDEKRAEDYKGVKKLLDRYYLSFINDVLHSIKLKNLNNYIS
LFRKKTRTEKENKELENLEINLRKEIAKAFKGNEGYKSLFKKDIIETILPEFLDDKDEIALVNSFNGFTTAFTGFFDNR
ENMFSEEAKSTSIAFRCINENLTRYISNMDIFEKVDAIFDKHEVQEIKEKILNSDYDVEDFFEGEFFNFVLTQEGIDVY
NAIIGGFVTESGEKIKGLNEYINLYNQKTKQKLPKFKPLYKQVLSDRESLSFYGEGYTSDEEVLEVFRNTLNKNSEIFS
SIKKLEKLFKNFDEYSSAGIFVKNGPAISTISKDIFGEWNVIRDKWNAEYDDIHLKKKAVVTEKYEDDRRKSFKKIGSF
SLEQLQEYADADLSVVEKLKEIIIQKVDEIYKVYGSSEKLFDADFVLEKSLKKNDAVVAIMKDLLDSVKSFENYIKAFF
GEGKETNRDESFYGDFVLAYDILLKVDHIYDAIRNYVTQKPYSKDKFKLYFQNPQFMGGWDKDKETDYRATILRYGSKY
YLAIMDKKYAKCLQKIDKDDVNGNYEKINYKLLPGPNKMLPKVFFSKKWMAYYNPSEDIQKIYKNGTFKKGDMENLNDC
HKLIDFFKDSISRYPKWSNAYDENFSETEKYKDIAGFYREVEEQGYKVSFESASKKEVDKLVEEGKLYMFQIYNKDFSD
KSHGTPNLHTMYFKLLFDENNHGQIRLSGGAELFMRRASLKKEELVVHPANSPIANKNPDNPKKTTTLSYDVYKDKRFS
EDQYELHIPIAINKCPKNIFKINTEVRVLLKHDDNPYVIGIDRGERNLLYIVVVDGKGNIVEQYSLNEIINNENGIRIK
TDYHSLLDKKEKERFEARQNWTSIENIKELKAGYISQVVHKICELVEKYDAVIALEDLNSGFKNSRVKVEKQVYQKFEK
MLIDKLNYMVDKKSNPCATGGALKGYQITNKFESFKSMSTQNGFIFYIPAWLTSKIDPSTGFVNLLKTKYTSIADSKKF
ISSFDRIMYVPEEDLFEFALDYKNFSRTDADYIKKWKLYSYGNRIRIFRNPKKNNVFDWEEVCLTSAYKELFNKYGINY
QQGDIRALLCEQSDKAFYSSFMALMSLMLQMRNSITGRTDVDFLISPVKNSDGIFYDSRNYEAQENAILPKNADANGAY
NIARKVLWAIGQFKKAEDEKLDKVKIAISNKEWLEYAQTSVKH (SEQ ID NO: 136)
Acidaminococcus sp. BV3L6 (Cas12a)
MTQFEGFTNLYQVSKTLRFELIPQGKTLKHIQEQGFIEEDKARNDHYKELKPIIDRIYKTYADQCLQLVQLDWENLSAA
IDSYRKEKTEETRNALIEEQATYRNAIHDYFIGRTDNLTDAINKRHAEIYKGLFKAELFNGKVLKQLGTVTTTEHENAL
LRSFDKFTTYFSGFYENRKNVFSAEDISTAIPHRIVQDNFPKFKENCHIFTRLITAVPSLREHFENVKKAIGIFVSTSI
EEVFSFPFYNQLLTQTQIDLYNQLLGGISREAGTEKIKGLNEVLNLAIQKNDETAHIIASLPHRFIPLFKQILSDRNTL
SFILEEFKSDEEVIQSFCKYKTLLRNENVLETAEALFNELNSIDLTHIFISHKKLETISSALCDHWDTLRNALYERRIS
ELTGKITKSAKEKVQRSLKHEDINLQEIISAAGKELSEAFKQKTSEILSHAHAALDQPLPTTLKKQEEKEILKSQLDSL
LGLYHLLDWFAVDESNEVDPEFSARLTGIKLEMEPSLSFYNKARNYATKKPYSVEKFKLNFQMPTLASGWDVNKEKNNG
AILFVKNGLYYLGIMPKQKGRYKALSFEPTEKTSEGFDKMYYDYFPDAAKMIPKCSTQLKAVTAHFQTHTTPILLSNNF
IEPLEITKEIYDLNNPEKEPKKFQTAYAKKTGDQKGYREALCKWIDFTRDFLSKYTKTTSIDLSSLRPSSQYKDLGEYY
AELNPLLYHISFQRIAEKEIMDAVETGKLYLFQIYNKDFAKGHHGKPNLHTLYWTGLFSPENLAKTSIKLNGQAELFYR
PKSRMKRMAHRLGEKMLNKKLKDQKTPIPDTLYQELYDYVNHRLSHDLSDEARALLPNVITKEVSHEIIKDRRFTSDKF
FFHVPITLNYQAANSPSKFNQRVNAYLKEHPETPIIGIDRGERNLIYITVIDSTGKILEQRSLNTIQQFDYQKKLDNRE
KERVAARQAWSVVGTIKDLKQGYLSQVIHEIVDLMIHYQAVVVLENLNFGFKSKRTGIAEKAVYQQFEKMLIDKLNCLV
LKDYPAEKVGGVLNPYQLTDQFTSFAKMGTQSGFLFYVPAPYTSKIDPLTGFVDPFVWKTIKNHESRKHFLEGFDFLHY
DVKTGDFILHFKMNRNLSFQRGLPGFMPAWDIVFEKNETQFDAKGTPFIAGKRIVPVIENHRFTGRYRDLYPANELIAL
LEEKGIVERDGSNILPKLLENDDSHAIDTMVALIRSVLQMRNSNAATGEDYINSPVRDLNGVCFDSRFQNPEWPMDADA
NGAYHIALKGQLLLNHLKESKDLKLONGISNODWLAYIQELRN (SEQ ID NO: 137)
Francisella novicida (FnCas12a)
MSIYQEFVNKYSLSKTLRFELIPQGKTLENIKARGLILDDEKRAKDYKKAKQIIDKYHQFFIEEILSSVCISEDLLQNY
SDVYFKLKKSDDDNLQKDFKSAKDTIKKQISEYIKDSEKFKNLFNQNLIDAKKGQESDLILWLKQSKDNGIELFKANSD
ITDIDEALEIIKSFKGWTTYFKGFHENRKNVYSSNDIPTSIIYRIVDDNLPKFLENKAKYESLKDKAPEAINYEQIKKD
LAEELTFDIDYKTSEVNQRVFSLDEVFEIANFNNYLNQSGITKENTIIGGKFVNGENTKRKGINEYINLYSQQINDKTL
KKYKMSVLFKQILSDTESKSFVIDKLEDDSDVVTTMQSFYEQIAAFKTVEEKSIKETLSLLFDDLKAQKLDLSKIYFKN
DKSLTDLSQQVEDDYSVIGTAVLEYITQQIAPKNLDNPSKKEQELIAKKTEKAKYLSLETIKLALEEFNKHRDIDKQCR
FEEILANFAAIPMIFDEIAQNKDNLAQISIKYQNQGKKDLLQASAEDDVKAIKDLLDQTNNLLHKLKIFHISQSEDKAN
ILDKDEHFYLVFEECYFELANIVPLYNKIRNYITQKPYSDEKFKLNFENSTLANGWDKNKEPDNTAILFIKDDKYYLGV
MNKKNNKIFDDKAIKENKGEGYKKIVYKLLPGANKMLPKVFFSAKSIKFYNPSEDILRIRNHSTHTKNGSPQKGYEKFE
FNIEDCRKFIDFYKQSISKHPEWKDFGFRFSDTQRYNSIDEFYREVENQGYKLTFENISESYIDSVVNQGKLYLFQIYN
KDFSAYSKGRPNLHTLYWKALFDERNLQDVVYKLNGEAELFYRKQSIPKKITHPAKEAIANKNKDNPKKESVFEYDLIK
DKRFTEDKFFFHCPITINFKSSGANKENDEINLLLKEKANDVHILSIDRGERHLAYYTLVDGKGNIIKQDTENIIGNDR
MKTNYHDKLAAIEKDRDSARKDWKKINNIKEMKEGYLSQVVHEIAKLVIEYNAIVVFEDLNFGFKRGRFKVEKQVYQKL
EKMLIEKLNYLVFKDNEFDKTGGVLRAYQLTAPFETFKKMGKQTGIIYYVPAGFTSKICPVTGFVNQLYPKYESVSKSQ
EFFSKFDKICYNLDKGYFEFSFDYKNFGDKAAKGKWTIASFGSRLINFRNSDKNHNWDTREVYPTKELEKLLKDYSIEY
GHGECIKAAICGESDKKFFAKLTSVLNTILQMRNSKTGTELDYLISPVADVNGNFFDSRQAPKNMPQDADANGAYHIGL
KGLMLLGRIKNNQEGKKLNLVIKNEEYFEFVONRNN (SEQ ID NO: 138)
Porphyromonas macacae Cas12a
MKTQHFFEDFTSLYSLSKTIRFELKPIGKTLENIKKNGLIRRDEQRLDDYEKLKKVIDEYHEDFIANILSSFSFSEEIL
QSYIQNLSESEARAKIEKTMRDTLAKAFSEDERYKSIFKKELVKKDIPVWCPAYKSLCKKFDNFTTSLVPFHENRKNLY
TSNEITASIPYRIVHVNLPKFIQNIEALCELQKKMGADLYLEMMENLRNVWPSFVKTPDDLCNLKTYNHLMVQSSISEY
NRFVGGYSTEDGTKHQGINEWINIYRQRNKEMRLPGLVFLHKQILAKVDSSSFISDTLENDDQVFCVLRQFRKLFWNTV
SSKEDDAASLKDLFCGLSGYDPEAIYVSDAHLATISKNIFDRWNYISDAIRRKTEVLMPRKKESVERYAEKISKQIKKR
QSYSLAELDDLLAHYSEESLPAGFSLLSYFTSLGGQKYLVSDGEVILYEEGSNIWDEVLIAFRDLQVILDKDFTEKKLG
KDEEAVSVIKKALDSALRLRKFFDLLSGTGAEIRRDSSFYALYTDRMDKLKGLLKMYDKVRNYLTKKPYSIEKFKLHFD
NPSLLSGWDKNKELNNLSVIFRQNGYYYLGIMTPKGKNLFKTLPKLGAEEMFYEKMEYKQIAEPMLMLPKVFFPKKTKP
AFAPDQSVVDIYNKKTFKTGQKGFNKKDLYRLIDFYKEALTVHEWKLFNFSFSPTEQYRNIGEFFDEVREQAYKVSMVN
VPASYIDEAVENGKLYLFQIYNKDFSPYSKGIPNLHTLYWKALFSEQNQSRVYKLCGGGELFYRKASLHMQDTTVHPKG
ISIHKKNLNKKGETSLFNYDLVKDKRFTEDKFFFHVPISINYKNKKITNVNQMVRDYIAQNDDLQIIGIDRGERNLLYI
SRIDTRGNLLEQFSLNVIESDKGDLRTDYQKILGDREQERLRRRQEWKSIESIKDLKDGYMSQVVHKICNMVVEHKAIV
VLENLNLSFMKGRKKVEKSVYEKFERMLVDKLNYLVVDKKNLSNEPGGLYAAYQLTNPLESFEELHRYPQSGILFFVDP
WNTSLTDPSTGFVNLLGRINYTNVGDARKFFDRENAIRYDGKGNILFDLDLSRFDVRVETQRKLWTLTTFGSRIAKSKK
SGKWMVERIENLSLCFLELFEQFNIGYRVEKDLKKAILSQDRKEFYVRLIYLENLMMQIRNSDGEEDYILSPALNEKNL
QFDSRLIEAKDLPVDADANGAYNVARKGLMVVQRIKRGDHESIHRIGRAQWLRY (SEQ ID NO: 139)
Moraxella bovoculi 237 Cas12a
MLFQDFTHLYPLSKTVRFELKPIDRTLEHIHAKNFLSQDETMADMHQKVKVILDDYHRDFIADMMGEVKLTKLAEFYDV
YLKFRKNPKDDELQKQLKDLQAVLRKEIVKPIGNGGKYKAGYDRLFGAKLFKDGKELGDLAKFVIAQEGESSPKLAHLA
HFEKFSTYFTGFHDNRKNMYSDEDKHTAIAYRLIHENLPRFIDNLQILTTIKQKHSALYDQIINELTASGLDVSLASHL
DGYHKLLTQEGITAYNTLLGGISGEAGSPKIQGINELINSHHNQHCHKSERIAKLRPLHKQILSDGMSVSFLPSKFADD
SEMCQAVNEFYRHYADVFAKVQSLFDGFDDHQKDGIYVEHKNLNELSKQAFGDFALLGRVLDGYYVDVVNPEFNERFAK
AKTDNAKAKLTKEKDKFIKGVHSLASLEQAIEHYTARHDDESVQAGKLGQYFKHGLAGVDNPIQKIHNNHSTIKGFLER
ERPAGERALPKIKSGKNPEMTQLRQLKELLDNALNVAHFAKLLTTKTTLDNQDGNFYGEFGVLYDELAKIPTLYNKVRD
YLSQKPFSTEKYKLNFGNPTLLNGWDLNKEKDNFGVILQKDGCYYLALLDKAHKKVFDNAPNTGKSIYQKMIYKYLEVR
KQFPKVFFSKEAIAINYHPSKELVEIKDKGRQRSDDERLKLYRFILECLKIHPKYDKKFEGAIGDIQLFKKDKKGREVP
ISEKDLFDKINGIFSSKPKLEMEDFFIGEFKRYNPSQDLVDQYNIYKKIDSNDNRKKENFYNNHPKFKKDLVRYYYESM
CKHEEWEESFEFSKKLQDIGCYVDVNELFTEIETRRLNYKISFCNINADYIDELVEQGQLYLFQIYNKDFSPKAHGKPN
LHTLYFKALFSEDNLADPIYKLNGEAQIFYRKASLDMNETTIHRAGEVLENKNPDNPKKRQFVYDIIKDKRYTQDKFML
HVPITMNFGVQGMTIKEFNKKVNQSIQQYDEVNVIGIDRGERHLLYLTVINSKGEILEQCSLNDITTASANGTQMTTPY
HKILDKREIERLNARVGWGEIETIKELKSGYLSHVVHQISQLMLKYNAIVVLEDLNFGFKRGRFKVEKQIYQNFENALI
KKLNHLVLKDKADDEIGSYKNALQLTNNFTDLKSIGKQTGFLFYVPAWNTSKIDPETGFVDLLKPRYENIAQSQAFFGK
FDKICYNADKDYFEFHIDYAKFTDKAKNSRQIWTICSHGDKRYVYDKTANQNKGAAKGINVNDELKSLFARHHINEKQP
NLVMDICQNNDKEFHKSLMYLLKTLLALRYSNASSDEDFILSPVANDEGVFENSALADDTQPQNADANGAYHIALKGLW
LLNELKNSDDLNKVKLAIDNQTWLNFAQNR (SEQ ID NO: 140)
Thiomicrospira sp. XS5 Cas12a
MGIHGVPAATKTFDSEFFNLYSLQKTVRFELKPVGETASFVEDFKNEGLKRVVSEDERRAVDYQKVKEIIDDYHRDFIE
ESLNYFPEQVSKDALEQAFHLYQKLKAAKVEEREKALKEWEALQKKLREKVVKCFSDSNKARFSRIDKKELIKEDLINW
LVAQNREDDIPTVETFNNFTTYFTGFHENRKNIYSKDDHATAISFRLIHENLPKFFDNVISFNKLKEGFPELKFDKVKE
DLEVDYDLKHAFEIEYFVNFVTQAGIDQYNYLLGGKTLEDGTKKQGMNEQINLFKQQQTRDKARQIPKLIPLFKQILSE
RTESQSFIPKQFESDQELFDSLQKLHNNCQDKFTVLQQAILGLAEADLKKVFIKTSDLNALSNTIFGNYSVFSDALNLY
KESLKTKKAQEAFEKLPAHSIHDLIQYLEQFNSSLDAEKQQSTDTVLNYFIKTDELYSRFIKSTSEAFTQVQPLFELEA
LSSKRRPPESEDEGAKGQEGFEQIKRIKAYLDTLMEAVHFAKPLYLVKGRKMIEGLDKDQSFYEAFEMAYQELESLIIP
IYNKARSYLSRKPFKADKFKINFDNNTLLSGWDANKETANASILFKKDGLYYLGIMPKGKTFLFDYFVSSEDSEKLKQR
RQKTAEEALAQDGESYFEKIRYKLLPGASKMLPKVFFSNKNIGFYNPSDDILRIRNTASHTKNGTPQKGHSKVEFNLND
CHKMIDFFKSSIQKHPEWGSFGFTFSDTSDFEDMSAFYREVENQGYVISFDKIKETYIQSQVEQGNLYLFQIYNKDFSP
YSKGKPNLHTLYWKALFEEANLNNVVAKLNGEAEIFFRRHSIKASDKVVHPANQAIDNKNPHTEKTQSTFEYDLVKDKR
YTQDKFFFHVPISLNFKAQGVSKFNDKVNGFLKGNPDVNIIGIDRGERHLLYFTVVNQKGEILVQESLNTLMSDKGHVN
DYQQKLDKKEQERDAARKSWTTVENIKELKEGYLSHVVHKLAHLIIKYNAIVCLEDLNFGFKRGRFKVEKQVYQKFEKA
LIDKLNYLVFKEKELGEVGHYLTAYQLTAPFESFKKLGKQSGILFYVPADYTSKIDPTTGFVNFLDLRYQSVEKAKQLL
SDFNAIRFNSVQNYFEFEIDYKKLTPKRKVGTQSKWVICTYGDVRYQNRRNQKGHWETEEVNVTEKLKALFASDSKTTT
VIDYANDDNLIDVILEQDKASFFKELLWLLKLTMTLRHSKIKSEDDFILSPVKNEQGEFYDSRKAGEVWPKDADANGAY
HIALKGLWNLQQINQWEKGKTLNLAIKNODWFSFIQEKPYQE (SEQ ID NO: 141)
Butyrivibrio sp. NC3005 Cas12a
MGIHGVPAAYYQNLTKKYPVSKTIRNELIPIGKTLENIRKNNILESDVKRKQDYEHVKGIMDEYHKQLINEALDNYMLP
SLNQAAEIYLKKHVDVEDREEFKKTQDLLRREVTGRLKEHENYTKIGKKDILDLLEKLPSISEEDYNALESFRNFYTYF
TSYNKVRENLYSDEEKSSTVAYRLINENLPKFLDNIKSYAFVKAAGVLADCIEEEEQDALFMVETFNMTLTQEGIDMYN
YQIGKVNSAINLYNQKNHKVEEFKKIPKMKVLYKQILSDREEVFIGEFKDDETLLSSIGAYGNVLMTYLKSEKINIFFD
ALRESEGKNVYVKNDLSKTTMSNIVFGSWSAFDELLNQEYDLANENKKKDDKYFEKRQKELKKNKSYTLEQMSNLSKED
ISPIENYIERISEDIEKICIYNGEFEKIVVNEHDSSRKLSKNIKAVKVIKDYLDSIKELEHDIKLINGSGQELEKNLVV
YVGQEEALEQLRPVDSLYNLTRNYLTKKPFSTEKVKLNFNKSTLLNGWDKNKETDNLGILFFKDGKYYLGIMNTTANKA
FVNPPAAKTENVFKKVDYKLLPGSNKMLPKVFFAKSNIGYYNPSTELYSNYKKGTHKKGPSFSIDDCHNLIDFFKESIK
KHEDWSKFGFEFSDTADYRDISEFYREVEKQGYKLTFTDIDESYINDLIEKNELYLFQIYNKDFSEYSKGKLNLHTLYF
MMLFDQRNLDNVVYKLNGEAEVFYRPASIAENELVIHKAGEGIKNKNPNRAKVKETSTFSYDIVKDKRYSKYKFTLHIP
ITMNFGVDEVRRENDVINNALRTDDNVNVIGIDRGERNLLYVVVINSEGKILEQISLNSIINKEYDIETNYHALLDERE
DDRNKARKDWNTIENIKELKTGYLSQVVNVVAKLVLKYNAIICLEDLNFGFKRGRQKVEKQVYQKFEKMLIEKLNYLVI
DKSREQVSPEKMGGALNALQLTSKFKSFAELGKQSGIIYYVPAYLTSKIDPTTGFVNLFYIKYENIEKAKQFFDGFDFI
RFNKKDDMFEFSFDYKSFTQKACGIRSKWIVYTNGERIIKYPNPEKNNLFDEKVINVTDEIKGLFKQYRIPYENGEDIK
EIIISKAEADFYKRLFRLLHQTLQMRNSTSDGTRDYIISPVKNDRGEFFCSEFSEGTMPKDADANGAYNIARKGLWVLE
QIRQKDEGEKVNLSMTNAEWLKYAQLHLL (SEQ ID NO: 142)
Brumimicrobium aurantiacum Cas12a

| | |
|---|---|
| 1 | MKNQINLFTN KFQLSKTLRF ELKPQGKTLE HINSKGFIKN DEKRADSYKK MKATIDAFHR |
| 61 | DFIDLAMSNV KLTNLIDFEE IYNASNADKK DEKYKTKLSK IQEILRKEIA KGFKGEEVKD |
| 121 | IFSKIDKKDL ITKLLEEWII ENKIEDIHFD PEFKNFTTYF SGFHQNRKNM YTDQEQSTAI |
| 181 | AYRLIHENLP RFIDNINIFQ KINKVPDLEE NLKKLYQEIE EYLGINAINE AFELEYFNET |
| 241 | LSQKGIDIYN LILGGRTAEE GKQKIQGLNE YINLYNQKQD KKNRVPKLKV LYKQILSDRT |
| 301 | RTSFLPDTFE DDEESSASQK VLDSINNFYL ENLIDYLPND KNSTINVLEN LKLLLAELIN |
| 361 | FELDKVYIKN DTSITNISMK IFKNYSVIRE ALNYFYENKI DPNFAHNENN ANTDKKREKL |
| 421 | EKEKAKITKQ TYLSISFIEE AIHLYINENS NGNQYKNTYK PNCIANYFKD FFIAENKEGS |
| 481 | NKEFDFISKI KARYNTIKGV LNTPFPDNKR LHQEKNNIDN IKHELDSIME YLHFAKPLVL |
| 541 | SGSFAFEKDE QFYTNFDELY NQLELIIPLY NKVRNYATQK PYSTEKFKLN FENSTLLNGW |
| 601 | DVNKEEANTS ILFIKNGFYY LGIMDKNHNK IFRNTPKSTN TDIYKKVNYK LLPGASKMLP |
| 661 | KVFFGKKNLD YYKPSKDILR IRNHGTHTKG GKPQSGFDKL DENLNDCHKL IDFFKDSIQK |
| 721 | HPDWSKFKFK FSDTQIYESI DQFYRELEPQ AYSITYTNID SSFIEEQINE GKLYLFQIYN |
| 781 | KDFSKFSNGK PNLHTLYWKA LFDEQNLKDV TYKLNGEAEI FYRKKSIQHD RQIIHKRNQP |
| 841 | IINKNPNNEK KESIFKYNII KDKRYTIDKF QFHVPITLNF KAKGTDYINY DVLDYLKENP |
| 901 | DVKIIGLDRG ERHLIYLTLI DQKGKILEQI SLNEIVNKKH NITTSYHNLL ETKEIERDKA |
| 961 | RKNWGTVETI KELKEGYISQ VVHKISKMMI EHNAIVVMED LNMGFKRGRF KVEKQVYQKL |
| 1021 | EKMLIDKLNY LVLKDRQPNE PAGIYNALQL TNKFESFQKL GKQSGFLFYV PAWNTSKIDP |
| 1081 | TTGFVNLFHV KYESVRKSQE FFNKENSIKY NPKEAIFEFD FDYNEFTTRA EGTKTNWTVC |
| 1141 | TYGDRIKTFR NPEKLNQWDN KEINITTAFE DFFGRHNITY GNGSDIKSQL ISREEKDFFS |
| 1201 | ELIHLFRLTL QMRNSKINSE IDYLISPVKN ENGFFYDSRH ADKNLPKDAD ANGAYHIAKK |
| 1261 | GLQWIKEIQS (SEQ ID NO: 143) |

Porphyromonas crevioricanis Cas12a

| | |
|---|---|
| 1 | MDSLKDFTNL YPVSKTLRFE LKPVGKTLEN IEKAGILKED EHRAESYRRV KKIIDTYHKV |
| 61 | FIDSSLENMA KMGIENEIKA MLQSFCELYK KDHRTEGEDK ALDKIRAVLR GLIVGAFTGV |
| 121 | CGRRENTVQN EKYESLFKEK LIKEILPDFV LSTEAESLPF SVEEATRSLK EFDSFTSYFA |
| 181 | GFYENRKNIY STKPQSTAIA YRLIHENLPK FIDNILVFQK IKEPIAKELE HIRADFSAGG |
| 241 | YIKKDERLED IFSLNYYIHV LSQAGIEKYN ALIGKIVTEG DGEMKGLNEH INLYNQQRGR |
| 301 | EDRLPLFRPL YKQILSDREQ LSYLPESFEK DEELLRALKE FYDHIAEDIL GRTQQLMTSI |
| 361 | SEYDLSRIYV RNDSQLTDIS KKMLGDWNAI YMARERAYDH EQAPKRITAK YERDRIKALK |
| 421 | GEESISLANL NSCIAFLDNV RDCRVDTYLS TLGQKEGPHG LSNLVENVFA SYHEAEQLLS |
| 481 | FPYPEENNLI QDKDNVVLIK NLLDNISDLQ RFLKPLWGMG DEPDKDERFY GEYNYIRGAL |
| 541 | DQVIPLYNKV RNYLTRKPYS TRKVKLNFGN SQLLSGWDRN KEKDNSCVIL RKGQNFYLAI |
| 601 | MNNRHKRSFE NKVLPEYKEG EPYFEKMDYK FLPDPNKMLP KVFLSKKGIE IYKPSPKLLE |
| 661 | QYGHGTHKKG DTFSMDDLHE LIDFFKHSIE AHEDWKQFGF KFSDTATYEN VSSFYREVED |
| 721 | QGYKLSFRKV SESYVYSLID QGKLYLFQIY NKDFSPCSKG TPNLHTLYWR MLFDERNLAD |
| 781 | VIYKLDGKAE IFFREKSLKN DHPTHPAGKP IKKKSRQKKG EESLFEYDLV KDRRYTMDKF |
| 841 | QFHVPITMNF KCSAGSKVND MVNAHIREAK DMHVIGIDRG ERNLLYICVI DSRGTILDQI |
| 901 | SLNTINDIDY HDLLESRDKD RQQERRNWQT IEGIKELKQG YLSQAVHRIA ELMVAYKAVV |
| 961 | ALEDLNMGFK RGRQKVESSV YQQFEKQLID KLNYLVDKKK RPEDIGGLLR AYQFTAPFKS |
| 1021 | FKEMGKQNGF LFYIPAWNTS NIDPTTGFVN LFHAQYENVD KAKSFFQKFD SISYNPKKDW |
| 1081 | FEFAFDYKNF TKKAEGSRSM WILCTHGSRI KNFRNSQKNG QWDSEEFALT EAFKSLFVRY |
| 1141 | EIDYTADLKT AIVDEKQKDF FVDLLKLFKL TVQMRNSWKE KDLDYLISPV AGADGRFFDT |
| | (SEQ ID NO: 144) |

Francisella tularensis Cas12a (Ft Cas12a)

| | |
|---|---|
| 1 | MSIYQEFVNK YSLSKTLRFE LIPQGKTLEN IKARGLILDD EKRAKDYKKA KQIIDKYHQF |
| 61 | FIEEILSSVC ISEDLLQNYS DVYFKLKKSD DDNLQKDFKS AKDTIKKQIS KYINDSEKFK |
| 121 | NLFNQNLIDA KKGQESDLIL WLKQSKDNGI ELFKANSDIT DIDEALEIIK SFKGWTTYFK |
| 181 | GFHENRKNVY SSNDIPTSII YRIVDDNLPK FLENKAKYES LKDKAPEAIN YEQIKKDLAE |
| 241 | ELTFDIDYKT SEVNQRVESL DEVFEIANEN NYLNQSGITK FNTIIGGKFV NGENTKRKGI |
| 301 | NEYINLYSQQ INDKTLKKYK MSVLFKQILS DTESKSFVID KLEDDSDVVT TMQSFYEQIA |
| 361 | AFKTVEEKSI KETLSLLFDD LKAQKLDLSK IYFKNDKSLT DLSQQVEDDY SVISTAVLEY |
| 421 | ITQQVAPKNL DNPSKKEQEL IAKKTEKAKY LSLETIKLAL EEFNKHRDID KQCRFEEILA |
| 481 | NFAAIPMIFD EIAQNKDNLA QISIKYQNQG KKDLLQASAE DDVKAIKDLL DQTNNLLHRL |
| 541 | KIFHISQSED KANILDKDEH FYLVFEECYF ELANIVPLYN KIRNYITQKP YSDEKFKLNF |
| 601 | ENSTLANGWD KNKEPDNTAI LFIKDDKYYL GVMNKKNNKI FDDKAIKENK GEGYKKIVYK |
| 661 | LLPGANKMLP KVFFSAKSIK FYNPSEDILR IRNHSTHTKN GSPQKGYEKF EFNIEDCRKF |
| 721 | IDFYKQSISK HPEWKDFGFR FSDTQRYNSI DEFYREVENQ GYKLTFENIS ESYIDSVVNQ |
| 781 | GKLYLFQIYN KDFSAYSKGR PNLHTLYWKA LFDERNLQDV VYKLNGEAEL FYRKQSIPKK |
| 841 | ITHPAKETIA NKNKDNPKKE SVFEYDLIKD KRFTEDKFFF HCPITINFKS SGANKENDEI |
| 901 | NLLLKEKAND VHILSIDRGE RHLAYYTLVD GKGNIIKQDT FNIIGNDRMK TNYHDKLAAI |
| 961 | EKDRDSARKD WKKINNIKEM KEGYLSQVVH EIAKLVIEHN AIVVFEDLNF GFKRGRFKVE |
| 1021 | KQVYQKLEKM LIEKLNYLVF KDNEFDKTGG VLRAYQLTAP FETFKKMGKQ TGIIYYVPAG |
| 1081 | FTSKICPVTG FVNQLYPKYE SVSKSQEFFS KEDKICYNLD KGYFEFSFDY KNFGDKAAKG |
| 1141 | KWTIASFGSR LINFRNSDKN HNWDTREVYP TKELEKLLKD YSIEYGHGEC IKAAICGESD |
| 1201 | KKFFAKLTSV LNTILQMRNS KTGTELDYLI SPVADVNGNF FDSRQAPKNM PQDADANGAY |
| 1261 | HIGLKGLMLL DRIKNNQEGK KLNLVIKNEE YFEFVQNRNN (SEQ ID NO: 145) |

Eubacterium ventriosum Cas12a

| | |
|---|---|
| 1 | MESNNKIFTE TIGTSSIAKT MRNSLVPTES TKRNIEKNGI IIDDQLRAEK RQQLKEIMDE |
| 61 | YYRAYIDSKL SNVALTRTID WKELFQAIEN NYKQNTTKTK NELEKKQKEK RTEIYKILSD |
| 121 | DEEFKQLFNA KLLTNILPEF IKNQNIDNEE KQEKISTVEL FQRFTSSFTD FFKNRKNVFS |
| 181 | KDEISTSICY RVVQENAWIF YQNLLAFEEI KKTAEQEIKK IEAENRDSIS DYSLKEIFDF |
| 241 | DFYGLLLNQG GIRFYNDVCG KINYHMNLYG QKHNIKSNKF KMKRMHKQIL SIDESTFEVP |
| 301 | TMFENDKEVY QVLNEFLSDL ASKKILERVE KIGENVSEYE INKIYIQSKN FENFSSFMCG |
| 361 | NWQIINDSLK TYYNEKIKSK GKAKVEKVKK AIKAIEYKSL ADINQLVERY NHDELNRKAE |
| 421 | EYISAINEKI KDLYVNEIEF DEKTNLIENE TKSEEIKSKL DSIMEIMHWT KMFIIEEEIE |
| 481 | KDVNFYNEIE EIYDELQPLV TIYNRIRNYV TQKPYSEEKI KLNFGIPTLA NGWSKTKEYD |
| 541 | NNAIIMIRDG KYYLGIFNAK NKPDKKIMEG HQSEENGDYK KMIYRLLPGP NKMLPKVEMS |
| 601 | KTGIAEYKPS QYILECYEQN KHIKSDKNED IKFCRDLIDF FKTSINRHPE WSKFNFKFSE |
| 661 | TSEYEDISTF YREVEKQGYK IEWTYISEKE IKELDENGQL YLFQIYNKDF SEKSKGKENL |
| 721 | HTMYLKNLFS EENLKNIVLK LNGEAEVFFR KSSIKKPIIH KKGSVLVNKT YNENGERKSI |
| 781 | PEEQYTEIYK YLNSIGTNEL SEKSKKLMEE GKVEYYKANY DIVKDYRYSV DKFFIHLPMT |
| 841 | INFKAAGFSP INNIALKSIA LKEDMHIIGI DRGERNLIYV SVIDTKGNIV EQRNFNIVNG |
| 901 | IDYKEKLKQK ELDRDNARKN WKEIGKIKDL KEGYLSLVVH EIAKLVVKYN AIITMEDLNQ |
| 961 | GFKRGRFKVE RQVYQKFETM LINKLNYLVD KDLAVDQEGG LLRGYQLTYI PESLKVLGRQ |
| 1021 | CGYIFYVPAA YTSKIDPTTG FVAIFNYKGM TDKDFVTSFD SIKYDDERGL FAFEFDYENF |
| 1081 | VTHKVEMARN KWTVYTYGER IKRKFKNGLW DTAEKVDLTY QMRSILEKYE IEYNKGQDIL |
| 1141 | EQIEELDEKA QNGICKEIKY LVKDIVQMRN SLPDNAVEDY DAIISPVINN NGEFFDSTRG |
| 1201 | DEDKPLDADA NGAYCIALKG LYEVMQIKKN WNEETEFPRK ELKIRHQDWF DFIQNKRYL |
| | (SEQ ID NO: 146) |

Cas12b sequences
Alicyclobacillus acidoterrestris Cas12b

| | |
|---|---|
| 1 | MAVKSIKVKL RLDDMPEIRA GLWKLHKEVN AGVRYYTEWL SLLRQENLYR RSPNGDGEQE |
| 61 | CDKTAEECKA ELLERLRARQ VENGHRGPAG SDDELLQLAR QLYELLVPQA IGAKGDAQQI |
| 121 | ARKFLSPLAD KDAVGGLGIA KAGNKPRWVR MREAGEPGWE EEKEKAETRK SADRTADVLR |
| 181 | ALADFGLKPL MRVYTDSEMS SVEWKPLRKG QAVRTWDRDM FQQAIERMMS WESWNQRVGQ |
| 241 | EYAKLVEQKN RFEQKNFVGQ EHLVHLVNQL QQDMKEASPG LESKEQTAHY VTGRALRGSD |
| 301 | KVFEKWGKLA PDAPFDLYDA EIKNVQRRNT RRFGSHDLFA KLAEPEYQAL WREDASFLTR |
| 361 | YAVYNSILRK LNHAKMFATF TLPDATAHPI WTREDKLGGN LHQYTFLENE FGERRHAIRF |
| 421 | HKLLKVENGV AREVDDVTVP ISMSEQLDNL LPRDPNEPIA LYFRDYGAEQ HFTGEFGGAK |
| 481 | IQCRRDQLAH MHRRRGARDV YLNVSVRVQS QSEARGERRP PYAAVFRLVG DNHRAFVHED |
| 541 | KLSDYLAEHP DDGKLGSEGL LSGLRVMSVD LGLRTSASIS VFRVARKDEL KPNSKGRVPF |
| 601 | FFPIKGNDNL VAVHERSQLL KLPGETESKD LRAIREERQR TLRQLRTQLA YLRLLVRCGS |
| 661 | EDVGRRERSW AKLIEQPVDA ANHMTPDWRE AFENELQKLK SLHGICSDKE WMDAVYESVR |
| 721 | RVWRHMGKQV RDWRKDVRSG ERPKIRGYAK DVVGGNSIEQ IEYLERQYKF LKSWSFFGKV |
| 781 | SGQVIRAEKG SRFAITLREH IDHAKEDRLK KLADRIIMEA LGYVYALDER GKGKWVAKYP |
| 841 | PCQLILLEEL SEYQFNNDRP PSENNQLMQW SHRGVFQELI NQAQVHDLLV GTMYAAFSSR |
| 901 | FDARTGAPGI RCRRVPARCT QEHNPEPFPW WLNKFVVEHT LDACPLRADD LIPTGEGEIF |
| 961 | VSPFSAEEGD FHQIHADLNA AQNLQQRLWS DEDISQIRLR CDWGEVDGEL VLIPRLTGKR |
| 1021 | TADSYSNKVF YTNTGVTYYE RERGKKRRKV FAQEKLSEEE AELLVEADEA REKSVVLMRD |
| 1081 | PSGIINRGNW TRQKEFWSMV NQRIEGYLVK QIRSRVPLQD SACENTGDI (SEQ ID NO: |
| | 147) |

Alicyclobacillus kakegawensis Cas12b

| | |
|---|---|
| 1 | MAVKSIKVKL RLSECPDILA GMWQLHRATN AGVRYYTEWV SLMRQEILYS RGPDGGQQCY |
| 61 | MTAEDCQREL LRRLRNRQLH NGRQDQPGTD ADLLAISRRL YEILVLQSIG KRGDAQQIAS |
| 121 | SFLSPLVDPN SKGGRGEAKS GRKPAWQKMR DQGDPRWVAA REKYEQRKAV DPSKEILNSL |
| 181 | DALGLRPLFA VFTETYRSGV DWKPLGKSQG VRTWDRDMFQ QALERLMSWE SWNRRVGEEY |
| 241 | ARLFQQKMKF EQEHFAEQSH LVKLARALEA DMRAASQGFE AKRGTAHQIT RRALRGADRV |
| 301 | FEIWKSIPEE ALFSQYDEVI RQVQAEKRRD FGSHDLFAKL AEPKYQPLWR ADETFLTRYA |
| 361 | LYNGVLRDLE KARQFATFTL PDACVNPIWT RFESSQGSNL HKYEFLFDHL GPGRHAVRFQ |
| 421 | RLLVVESEGA KERDSVVVPV APSGQLDKLV LREEEKSSVA LHLHDTARPD GFMAEWAGAK |
| 481 | LQYERSTLAR KARRDKQGMR SWRRQPSMLM SAAQMLEDAK QAGDVYLNIS VRVKSPSEVR |
| 541 | GQRRPPYAAL FRIDDKQRRV TVNYNKLSAY LEEHPDKQIP GAPGLLSGLR VMSVDLGLRT |
| 601 | SASISVFRVA KKEEVEALGD GRPPHYYPIH GTDDLVAVHE RSHLIQMPGE TETKQLRKLR |
| 661 | EERQAVLRPL FAQLALLRLL VRCGAADERI RTRSWQRLTK QGREFTKRLT PSWREALELE |
| 721 | LTRLEAYCGR VPDDEWSRIV DRTVIALWRR MGKQVRDWRK QVKSGAKVKV KGYQLDVVGG |
| 781 | NSLAQIDYLE QQYKFLRRWS FFARASGLVV RADRESHFAV ALRQHIENAK RDRLKKLADR |
| 841 | ILMEALGYVY EASGPREGQW TAQHPPCQLI ILEELSAYRF SDDRPPSENS KLMAWGHRGI |
| 901 | LEELVNQAQV HDVLVGTVYA AFSSRFDART GAPGVRCRRV PARFVGATVD DSLPLWLTEF |
| 961 | LDKHRLDKNL LRPDDVIPTG EGEFLVSPCG EEAARVRQVH ADINAAQNLQ RRLWQNFDIT |
| 1021 | ELRLRCDVKM GGEGTVLVPR VNNARAKQLF GKKVLVSQDG VTFFERSQTG GKPHSEKQTD |
| 1081 | LTDKELELIA EADEARAKSV VLERDPSGHI GKGHWIRQRE FWSLVKQRIE SHTAERIRVR |
| 1141 | GVGSSLD (SEQ ID NO: 148) |

Alicyclobacillus macrosporangiidus Cas12b

| | |
|---|---|
| 1 | MAVKSIKVKL MLGHLPEIRE GLWHLHEAVN LGVRYYTEWL ALLRQGNLYR RGKDGAQECY |
| 61 | MTAEQCRQEL LVRLRDRQKR NGHTGDPGTD EELLGVARRL YELLVPQSVG KKGQAQMLAS |
| 121 | GFLSPLADPK SEGGKGTSKS GRKPAWMGMK EAGDSRWVEA KARYEANKAK DPTKQVIASL |
| 181 | EMYGLRPLED VFTETYKTIR WMPLGKHQGV RAWDRDMFQQ SLERLMSWES WNERVGAEFA |
| 241 | RLVDRRDRFR EKHFTGQEHL VALAQRLEQE MKEASPGFES KSSQAHRITK RALRGADGII |
| 301 | DDWLKLSEGE PVDRFDEILR KRQAQNPRRF GSHDLFLKLA EPVFQPLWRE DPSFLSRWAS |
| 361 | YNEVLNKLED AKQFATFTLP SPCSNPVWAR FENAEGTNIF KYDFLFDHFG KGRHGVRFQR |
| 421 | MIVMRDGVPT EVEGIVVPIA PSRQLDALAP NDAASPIDVF VGDPAAPGAF RGQFGGAKIQ |
| 481 | YRRSALVRKG RREEKAYLCG FRLPSQRRTG TPADDAGEVF LNLSLRVESQ SEQAGRRNPP |
| 541 | YAAVFHISDQ TRRVIVRYGE IERYLAEHPD TGIPGSRGLT SGLRVMSVDL GLRTSAAISV |
| 601 | FRVAHRDELT PDAHGRQPFF FPIHGMDHLV ALHERSHLIR LPGETESKKV RSIREQRLDR |
| 661 | LNRLRSQMAS LRLLVRTGVL DEQKRDRNWE RLQSSMERGG ERMPSDWWDL FQAQVRYLAQ |
| 721 | HRDASGEAWG RMVQAAVRTL WRQLAKQVRD WRKEVRRNAD KVKIRGIARD VPGGHSLAQL |
| 781 | DYLERQYRFL RSWSAFSVQA GQVVRAERDS REAVALREHI DNGKKDRLKK LADRILMEAL |
| 841 | GYVYVTDGRR AGQWQAVYPP CQLVLLEELS EYRFSNDRPP SENSQLMVWS HRGVLEELIH |
| 901 | QAQVHDVLVG TIPAAFSSRF DARTGAPGIR CRRVPSIPLK DAPSIPIWLS HYLKQTERDA |
| 961 | AALRPGELIP TGDGEFLVTP AGRGASGVRV VHADINAAHN LQRRLWENFD LSDIRVRCDR |
| 1021 | REGKDGTVVL IPRLTNQRVK ERYSGVIFTS EDGVSFTVGD AKTRRRSSAS QGEGDDLSDE |
| 1081 | EQELLAEADD ARERSVVLFR DPSGFVNGGR WTAQRAFWGM VHNRIETLLA ERFSVSGAAE |
| 1141 | KVRG (SEQ ID NO: 149) |

Alicyclobacillus hesperidum Cas12b

| | |
|---|---|
| 1 | MTVRSIRVKL AVGSPQYRDV RRGLWKTHEI MNQGVRYYCE WLVLMRQEPI YDEDEHGLTV |
| 61 | VQRTREDIQA ELLSRLRTLQ SAHQHSGDMG TDEELLSLMR QLYEQLVPSS VDKNKSGDAR |
| 121 | MIARNFFNPL TNPNSQGGLG ISNAGRKPKW LLKKLSGDPT WEEDYKKAME QKQESSVSFL |
| 181 | LLELRRFGLH PIFLPYTDTV LEVSWAPKKA RQWVRKWDYD LFQQSIERML SWESWTRRVK |
| 241 | ERFEKLVESE KKFYDENFAT DPEFIKLAET LEGELQASSQ GFVAVDEHAF QIRPRSMRGF |
| 301 | DRVADEWCKL ADDAPIEEYE AAIKRVQARL GRNFGSYVLF AHLAKPEYWS LWRSDPTKIL |
| 361 | RFARLRALQR AVARAKRHAR LTLPDAIHHP IWIRYDAKGK NIYSYRLLIP EKRSKRYYVE |
| 421 | FSSLIMPDGE NRWAEHRNIR VPLAFSRQWE RLHFSIMEDG SLCVQYRDPG VDEPLRAELG |
| 481 | GAKIQFDRRY LIRRSSTLSA GECGPVYLNV SVDVNPAHRP DVQVLQSAKL VSVSRDTNRI |
| 541 | YLRPENLSAY WKSQGDGTLP LRVMSVDLGV RSSAAVVICR LEHRDSVVSS GRRTATIYRI |
| 601 | AGTDEFVAVQ ERAFLLRLPG EGKGTNEDAP LRDVYAQLGT IRQGIQILRS LLRLCDTKTP |
| 661 | DERQEALHGL AQSLEPSGAW KDELHPHLVM LQGVVHDSVD NWKQKVISVH RQMERILGHA |
| 721 | VREWKVARKN AGKPPIRRGA GGLSLRRIRQ LEQERRTLVA WSNHAREPGQ VVRIKRGTQV |
| 781 | AQWLVERVNH LKEDRLKKLA DLLIMTALGY VYDETKPSGH KWDKRYPPCQ IILMEDLSRY |
| 841 | RFQSDRPPSE NSQLMAWSHR RLLEILKLQA DLHKLIVGTV FPAFSSREDA QSGAPGVRCR |
| 901 | SVKKQDIENA AQGKGWLARE LQRLNWTLEW LQPNDLIPTG DGELFVTPAC CDRQKGIKIV |
| 961 | HADLNAAQNL QRRFWGGHAE SLCRVTCDVV ERDGRRYAVP RISNAFADSF YKVFGQGVFV |
| 1021 | STDEEDVYRW MVGEKISSRG RSRGRTSDEE AEAETWIDEA REQQGKVIAL FRDASGQIHG |
| 1081 | GDWLVAKVFW GWVERLVTAR LLSRMSEREA AAHKE (SEQ ID NO: 150) |

Sulfobacillus thermotolerans Cas12b

| | |
|---|---|
| 1 | MSARNIKVKI DTKGNPELRL GLWKTHQVTN EGVKYYTEWL IKLRQQDIYR QSREDASPRV |
| 61 | IISASDLKAD LLCHARQLQK ERLPRITGSD AEILGTLRQV YELIVPSSVG KSGDSKTLAR |
| 121 | KFLSPLTDPG SAGGRDQSAS GRKPTWMKMK SEGNPRWEET FRKWKDRKDN DPTPLVLNQI |
| 181 | ADYGLLPLIP LFTDVGENIF DPKSKSQFVR TWDRSMFQQA IERLMSWESW NQRVRREWEA |
| 241 | LNQKHSAFYR EQFTADPDAA LYRVAQSLEE EMRKEHQGFA SDAPEAFRIR RVALKGFDRL |
| 301 | LERWQKTLGK NGQSATLLDD IRRVQSDLGD KFGSAPLYQK LLDERWQRLW AVDPTFLQRY |
| 361 | AAFNDLTQRL QRAKRVANLT LPDAVAHPIW SRYEGANASS GNRYHIHLPT KGQPGSVTED |
| 421 | RILWPDGNGG WYERKRVTVF LRPSHQVDRI HEAPTDSVVD NFPLVVEDQS ARTILRASWG |
| 481 | GAKLEYDRNR LPRQLKKGVP DSIYLSLTLN LDTNKPSGLF HTQQNGRVWI RKDVLMQYYN |
| 541 | ETPGDNVQFK PLYVMSVDLG IRSAAAVSIF SVQLKAGIEE HRLTYPVADC PGLVAVHERS |
| 601 | VLLTMPGERR EQWDRRYEQQ RQGLRELRTD MRGMNDLLRG AYMDGDRREE FLARLSKLEE |
| 661 | TSPELWGPVY RSLNDSKVAS ATEWERLVVY CHRQVEQSLS SRIQNLRSGR SAYRMSGGLS |
| 721 | LDHVQDLERI RGIIASWTNH PRIPGSVVRW QQGRSHTVAL GRHILELKRD RVKKVANYLI |
| 781 | MTTLGYAYDS KRARGEKWVR RYPACHLMVF EDLTRYRFRT DRPRSENRQL MRWTHQELIA |
| 841 | VTGIQAEPHG ISVGTMYAGF SSRFDAVTKA PGVRGATVRQ ILRTRGMVRL KEIAADVGID |
| 901 | INTLRPHDVL PTGDGEYLLS VVRHGESYRL KQVHADINAA HNLQRRLWTQ DEVFRVSCRL |
| 961 | ALNSGRVVAM PPPSYNKRYG KGFFEKGDNG VYIWKTGGKI KISDTLEEDM DIPEDTAELL |
| 1021 | RGNSVTLFRD PSGTIAGGNW LEAKEFWGRV NSLVNKGVRD KILGGIPVDN SSAHAE (SEQ ID |
| | NO: 151) |

Cas12c (c2c3) sequences
Cas12c1 (see Yan et al (2019) Science Vol. 363, Issue 6422, pp. 88-91)
MQTKKTHLHLISAKASRKYRRTIACLSDTAKKDLERRKQSGAADPAQELSCLKT
IKFKLEVPEGSKLPSFDRISQIYNALETIEKGSLSYLLFALILSGFRIFPNSSA
AKTFASSSCYKNDQFASQIKEIFGEMVKNFIPSELESILKKGRRKNNKDWTEEN
IKRVLNSEFGRKNSEGSSALFDSFLSKFSQELFRKFDSWNEVNKKYLEAAELLD
SMLASYGPFDSVCKMIGDSDSRNSLPDKSTIAFTNNAEITVDIESSVMPYMAIA
ALLREYRQSKSKAAPVAYVQSHLTTTNGNGLSWFFKFGLDLIRKAPVSSKQSTS
DGSKSLQELFSVPDDKLDGLKFIKEACEALPEASLLCGEKGELLGYQDFRTSFA
GHIDSWVANYVNRLFELIELVNQLPESIKLPSILTQKNHNLVASLGLQEAEVSH
SLELFEGLVKNVRQTLKKLAGIDISSSPNEQDIKEFYAFSDVLNRLGSIRNQIE
NAVQTAKKDKIDLESAIEWKEWKKLKKLPKLNGLGGGVPKQQELLDKALESVKQ
IRHYQRIDFERVIQWAVNEHCLETVPKFLVDAEKKKINKESSTDFAAKENAVRF
LLEGIGAAARGKTDSVSKAAYNWFVVNNFLAKKDLNRYFINCQGCIYKPPYSKR
RSLAFALRSDNKDTIEVVWEKFETFYKEISKEIEKFNIFSQEFQTFLHLENLRM
KLLLRRIQKPIPAEIAFFSLPQEYYDSLPPNVAFLALNQEITPSEYITQFNLYS
SFLNGNLILLRRSRSYLRAKFSWVGNSKLIYAAKEARLWKIPNAYWKSDEWKMI
LDSNVLVFDKAGNVLPAPTLKKVCEREGDLRLFYPLLRQLPHDWCYRNPFVKSV
GREKNVIEVNKEGEPKVASALPGSLFRLIGPAPFKSLLDDCFFNPLDKDLRECM
LIVDQEISQKVEAQKVEASLESCTYSIAVPIRYHLEEPKVSNQFENVLAIDQGE
AGLAYAVFSLKSIGEAETKPIAVGTIRIPSIRRLIHSVSTYRKKKQRLQNFKQN
YDSTAFIMRENVTGDVCAKIVGLMKEFNAFPVLEYDVKNLESGSRQLSAVYKAV
NSHFLYFKEPGRDALRKQLWYGGDSWTIDGIEIVTRERKEDGKEGVEKIVPLKV
FPGRSVSARFTSKTCSCCGRNVFDWLFTEKKAKTNKKFNVNSKGELTTADGVIQ
LFEADRSKGPKFYARRKERTPLTKPIAKGSYSLEEIERRVRTNLRRAPKSKQSR
DTSQSQYFCVYKDCALHFSGMQADENAAINIGRRFLTALRKNRRSDFPSNVKIS
DRLLDN** (SEQ ID NO: 152)
Cas12c2 (see Yan et al (2019) Science Vol. 363, Issue 6422, pp. 88-91)
MTKHSIPLHAFRNSGADARKWKGRIALLAKRGKETMRTLQFPLEMSEPEAAAIN
TTPFAVAYNAIEGTGKGTLFDYWAKLHLAGFRFFPSGGAATIFRQQAVFEDASW
NAAFCQQSGKDWPWLVPSKLYERFTKAPREVAKKDGSKKSIEFTQENVANESHV
SLVGASITDKTPEDQKEFFLKMAGALAEKFDSWKSANEDRIVAMKVIDEFLKSE
GLHLPSLENIAVKCSVETKPDNATVAWHDAPMSGVQNLAIGVFATCASRIDNIY
DLNGGKLSKLIQESATTPNVTALSWLFGKGLEYFRTTDIDTIMQDENIPASAKE
SIKPLVESAQAIPTMTVLGKKNYAPFRPNFGGKIDSWIANYASRLMLLNDILEQ
IEPGFELPQALLDNETLMSGIDMTGDELKELIEAVYAWVDAAKQGLATLLGRGG
NVDDAVQTFEQFSAMMDTLNGTLNTISARYVRAVEMAGKDEARLEKLIECKFDI
PKWCKSVPKLVGISGGLPKVEEEIKVMNAAFKDVRARMEVRFEEIAAYVASKGA
GMDVYDALEKRELEQIKKLKSAVPERAHIQAYRAVLHRIGRAVQNCSEKTKQLF
SSKVIEMGVFKNPSHLNNFIFNQKGAIYRSPFDRSRHAPYQLHADKLLKNDWLE
LLAEISATLMASESTEQMEDALRLERTRLQLQLSGLPDWEYPASLAKPDIEVEI
QTALKMQLAKDTVTSDVLQRAFNLYSSVLSGLTFKLLRRSFSLKMRFSVADTTQ
LIYVPKVCDWAIPKQYLQAEGEIGIAARVVTESSPAKMVTEVEMKEPKALGHFM
QQAPHDWYFDASLGGTQVAGRIVEKGKEVGKERKLVGYRMRGNSAYKTVLDKSL
VGNTELSQCSMIIEIPYTQTVDADFRAQVQAGLPKVSINLPVKETITASNKDEQ
MLFDRFVAIDLGERGLGYAVFDAKTLELQESGHRPIKAITNLLNRTHHYEQRPN
QRQKFQAKFNVNLSELRENTVGDVCHQINRICAYYNAFPVLEYMVPDRLDKQLK
SVYESVTNRYIWSSTDAHKSARVQFWLGGETWEHPYLKSAKDKKPLVLSPGRGA
SGKGTSQTCSCCGRNPFDLIKDMKPRAKIAVVDGKAKLENSELKLFERNLESKD
DMLARRHRNERAGMEQPLTPGNYTVDEIKALLRANLRRAPKNRRTKDTTVSEYH
CVFSDCGKTMHADENAAVNIGGKFIADIEK** (SEQ ID NO: 153)
Cas12c3 (see Yan et al (2019) Science Vol. 363, Issue 6422, pp. 88-91)
MTKLRHRQKKLTHDWAGSKKREVLGSNGKLQNPLLMPVKKGQVTEFRKAFSAYA
RATKGEMTDGRKNMFTHSFEPFKTKPSLHQCELADKAYQSLHSYLPGSLAHFLL
SAHALGFRIFSKSGEATAFQASSKIEAYESKLASELACVDLSIQNLTISTLFNA
LTTSVRGKGEETSADPLIARFYTLLTGKPLSRDTQGPERDLAEVISRKIASSFG
TWKEMTANPLQSLQFFEEELHALDANVSLSPAFDVLIKMNDLQGDLKNRTIVED
PDAPVFEYNAEDPADIIIKLTARYAKEAVIKNQNVGNYVKNAITTTNANGLGWL
LNKGLSLLPVSTDDELLEFIGVERSHPSCHALIELIAQLEAPELFEKNVFSDTR
SEVQGMIDSAVSNHIARLSSSRNSLSMDSEELERLIKSFQIHTPHCSLFIGAQS
LSQQLESLPEALQSGVNSADILLGSTQYMLTNSLVEESIATYQRTLNRINYLSG
VAGQINGAIKRKAIDGEKIHLPAAWSELISLPFIGQPVIDVESDLAHLKNQYQT
LSNEFDTLISALQKNFDLNFNKALLNRTQHFEAMCRSTKKNALSKPEIVSYRDL
LARLTSCLYRGSLVLRRAGIEVLKKHKIFESNSELREHVHERKHFVFVSPLDRK
AKKLLRLTDSRPDLLHVIDEILQHDNLENKDRESLWLVRSGYLLAGLPDQLSSS
FINLPIITQKGDRRLIDLIQYDQINRDAFVMLVTSAFKSNLSGLQYRANKQSFV
VTRTLSPYLGSKLVYVPKDKDWLVPSQMFEGRFADILQSDYMVWKDAGRLCVID
TAKHLSNIKKSVFSSEEVLAFLRELPHRTFIQTEVRGLGVNVDGIAFNNGDIPS
LKTFSNCVQVKVSRTNTSLVQTLNRWFEGGKVSPPSIQFERAYYKKDDQIHEDA
AKRKIRFQMPATELVHASDDAGWTPSYLLGIDPGEYGMGLSLVSINNGEVLDSG
FIHINSLINFASKKSNHQTKVVPRQQYKSPYANYLEQSKDSAAGDIAHILDRLI
YKLNALPVFEALSGNSQSAADQVWTKVLSFYTWGDNDAQNSIRKQHWFGASHWD
IKGMLRQPPTEKKPKPYIAFPGSQVSSYGNSQRCSCCGRNPIEQLREMAKDTSI
KELKIRNSEIQLFDGTIKLFNPDPSTVIERRRHNLGPSRIPVADRTFKNISPSS
LEFKELITIVSRSIRHSPEFIAKKRGIGSEYFCAYSDCNSSLNSEANAAANVAQ
KFQKQLFFEL** (SEQ ID NO: 154)
Cas12d (CasY) sequences
Candidatus Katanobacteria Cas12d (CasY.1) MOEH01000029
MRKKLFKGYILHNKRLVYTGKAAIRSIKYPLVAPNKTALNNLSEKIIYDYEHLFGPLNVA
SYARNSNRYSLVDFWIDSLRAGVIWQSKSTSLIDLISKLEGSKSPSEKIFEQIDFELKNK
LDKEQFKDIILLNTGIRSSSNVRSLRGRFLKCFKEEFRDTEEVIACVDKWSKDLIVEGKS
ILVSKQFLYWEEEFGIKIFPHFKDNHDLPKLTFFVEPSLEFSPHLPLANCLERLKKEDIS
RESLLGLDNNFSAFSNYFNELFNLLSRGEIKKIVTAVLAVSKSWENEPELEKRLHFLSEK
AKLLGYPKLTSSWADYRMIIGGKIKSWHSNYTEQLIKVREDLKKHQIALDKLQEDLKKVV
DSSLREQIEAQREALLPLLDTMLKEKDFSDDLELYRFILSDFKSLLNGSYQRYIQTEEER
KEDRDVTKKYKDLYSNLRNIPRFFGESKKEQFNKFINKSLPTIDVGLKILEDIRNALETV
SVRKPPSITEEYVTKQLEKLSRKYKINAFNSNRFKQITEQVLRKYNNGELPKISEVFYRY
PRESHVAIRILPVKISNPRKDISYLLDKYQISPDWKNSNPGEVVDLIEIYKLTLGWLLSC
NKDFSMDFSSYDLKLFPEAASLIKNFGSCLSGYYLSKMIFNCITSEIKGMITLYTRDKFV
VRYVTQMIGSNQKFPLLCLVGEKQTKNFSRNWGVLIEEKGDLGEEKNQEKCLIFKDKTDF
AKAKEVEIFKNNIWRIRTSKYQIQFLNRLFKKTKEWDLMNLVLSEPSLVLEEEWGVSWDK
DKLLPLLKKEKSCEERLYYSLPLNLVPATDYKEQSAEIEQRNTYLGLDVGEFGVAYAVVR
IVRDRIELLSWGFLKDPALRKIRERVQDMKKKQVMAVFSSSSTAVARVREMAIHSLRNQI
HSIALAYKAKIIYEISISNFETGGNRMAKIYRSIKVSDVYRESGADTLVSEMIWGKKNKQ
MGNHISSYATSYTCCNCARTPFELVIDNDKEYEKGGDEFIFNVGDEKKVRGFLQKSLLGK
TIKGKEVLKSIKEYARPPIREVLLEGEDVEQLLKRRGNSYIYRCPFCGYKTDADIQAALN
IACRGYISDNAKDAVKEGERKLDYILEVRKLWEKNGAVLRSAKFL (SEQ ID NO: 155)
Candidatus Vogelbacteria Cas12d (CasY.2) MOEJ01000028
MQKVRKTLSEVHKNPYGTKVRNAKTGYSLQIERLSYTGKEGMRSFKIPLENKNKEVFDEF
VKKIRNDYISQVGLLNLSDWYEHYQEKQEHYSLADFWLDSLRAGVIFAHKETEIKNLISK
IRGDKSIVDKFNASIKKKHADLYALVDIKALYDFLTSDARRGLKTEEEFFNSKRNTLFPK
FRKKDNKAVDLWVKKFIGLDNKDKLNFTKKFIGFDPNPQIKYDHTFFFHQDINFDLERIT
TPKELISTYKKFLGKNKDLYGSDETTEDQLKMVLGFHNNHGAFSKYFNASLEAFRGRDNS
LVEQIINNSPYWNSHRKELEKRIIFLQVQSKKIKETELGKPHEYLASFGGKFESWVSNYL
RQEEEVKRQLFGYEENKKGQKKFIVGNKQELDKIIRGTDEYEIKAISKETIGLTQKCLKL
LEQLKDSVDDYTLSLYRQLIVELRIRLNVEFQETYPELIGKSEKDKEKDAKNKRADKRYP
QIFKDIKLIPNFLGETKQMVYKKFIRSADILYEGINFIDQIDKQITQNLLPCFKNDKERI
EFTEKQFETLRRKYYLMNSSRFHHVIEGIINNRKLIEMKKRENSELKTFSDSKFVLSKLF
LKKGKKYENEVYYTFYINPKARDQRRIKIVLDINGNNSVGILQDLVQKLKPKWDDIIKKN
DMGELIDAIEIEKVRLGILIALYCEHKFKIKKELLSLDLFASAYQYLELEDDPEELSGTN
LGRFLQSLVCSEIKGAINKISRTEYIERYTVQPMNTEKNYPLLINKEGKATWHIAAKDDL
SKKKGGGTVAMNQKIGKNFFGKQDYKTVFMLQDKRFDLLTSKYHLQFLSKTLDTGGGSWW
KNKNIDLNLSSYSFIFEQKVKVEWDLTNLDHPIKIKPSENSDDRRLFVSIPFVIKPKQTK
RKDLQTRVNYMGIDIGEYGLAWTIINIDLKNKKINKISKQGFIYEPLTHKVRDYVATIKD
NQVRGTFGMPDTKLARLRENAITSLRNQVHDIAMRYDAKPVYEFEISNFETGSNKVKVIY
DSVKRADIGRGQNNTEADNTEVNLVWGKTSKQFGSQIGAYATSYICSFCGYSPYYEFENS
KSGDEEGARDNLYQMKKLSRPSLEDFLQGNPVYKTFRDFDKYKNDQRLQKTGDKDGEWKT
HRGNTAIYACQKCRHISDADIQASYWIALKQVVRDFYKDKEMDGDLIQGDNKDKRKVNEL
NRLIGVHKDVPIINKNLITSLDINLL (SEQ ID NO: 156)
Candidatus Vogelbacteria Cas12d (CasY.3) MOEK01000006
MKAKKSFYNQKRKFGKRGYRLHDERIAYSGGIGSMRSIKYELKDSYGIAGLRNR
IADATISDNKWLYGNINLNDYLEWRSSKTDKQIEDGDRESSLLGFWLEALRLGFVESKQS
HAPNDFNETALQDLFETLDDDLKHVLDRKKWCDFIKIGTPKTNDQGRLKKQIKNLLKGNK
REEIEKTLNESDDELKEKINRIADVFAKNKSDKYTIFKLDKPNTEKYPRINDVQVAFFCH
PDFEEITERDRTKTLDLIINRFNKRYEITENKKDDKTSNRMALYSLNQGYIPRVLNDLFL
FVKDNEDDFSQFLSDLENFFSFSNEQIKIIKERLKKLKKYAEPIPGKPQLADKWDDYASD
FGGKLESWYSNRIEKLKKIPESVSDLRNNLEKIRNVLKKQNNASKILELSQKIIEYIRDY
GVSFEKPEIIKFSWINKTKDGQKKVFYVAKMADREFIEKLDLWMADLRSQLNEYNQDNKV
SFKKKGKKIEELGVLDFALNKAKKNKSTKNENGWQQKLSESIQSAPLFFGEGNRVRNEEV
YNLKDLLFSEIKNVENILMSSEAEDLKNIKIEYKEDGAKKGNYVLNVLARFYARFNEDGY
GGWNKVKTVLENIAREAGTDFSKYGNNNNRNAGRFYLNGRERQVFTLIKFEKSITVEKIL
ELVKLPSLLDEAYRDLVNENKNHKLRDVIQLSKTIMALVLSHSDKEKQIGGNYIHSKLSG
YNALISKRDFISRYSVQTTNGTQCKLAIGKGKSKKGNEIDRYFYAFQFFKNDDSKINLKV
IKNNSHKNIDENDNENKINALQVYSSNYQIQFLDWFFEKHQGKKTSLEVGGSFTIAEKSL
TIDWSGSNPRVGFKRSDTEEKRVFVSQPFTLIPDDEDKERRKERMIKTKNRFIGIDIGEY
GLAWSLIEVDNGDKNNRGIRQLESGFITDNQQQVLKKNVKSWRQNQIRQTFTSPDTKIAR
LRESLIGSYKNQLESLMVAKKANLSFEYEVSGFEVGGKRVAKIYDSIKRGSVRKKDNNSQ
NDQSWGKKGINEWSFETTAAGTSQFCTHCKRWSSLAIVDIEEYELKDYNDNLFKVKINDG
EVRLLGKKGWRSGEKIKGKELFGPVKDAMRPNVDGLGMKIVKRKYLKLDLRDWVSRYGNM
AIFICPYVDCHHISHADKQAAFNIAV (SEQ ID NO: 157)
Candidatus Parcubacteria Cas12d (CasY.4) KY040242
MSKRHPRISGVKGYRLHAQRLEYTGKSGAMRTIKYPLYSSPSGGRTVPREIVSAINDDYV
GLYGLSNFDDLYNAEKRNEEKVYSVLDFWYDCVQYGAVFSYTAPGLLKNVAEVRGGSYEL
TKTLKGSHLYDELQIDKVIKFLNKKEISRANGSLDKLKKDIIDCFKAEYRERHKDQCNKL
ADDIKNAKKDAGASLGERQKKLFRDFFGISEQSENDKPSFTNPLNLTCCLLPFDTVNNNR
NRGEVLENKLKEYAQKLDKNEGSLEMWEYIGIGNSGTAFSNFLGEGFLGRLRENKITELK
KAMMDITDAWRGQEQEEELEKRLRILAALTIKLREPKFDNHWGGYRSDINGKLSSWLQNY
INQTVKIKEDLKGHKKDLKKAKEMINRFGESDTKEEAVVSSLLESIEKIVPDDSADDEKP
DIPAIAIYRRFLSDGRLTLNRFVQREDVQEALIKERLEAEKKKKPKKRKKKSDAEDEKET
IDFKELFPHLAKPLKLVPNFYGDSKRELYKKYKNAAIYTDALWKAVEKIYKSAFSSSLKN
SFFDTDFDKDFFIKRLQKIFSVYRRENTDKWKPIVKNSFAPYCDIVSLAENEVLYKPKQS
RSRKSAAIDKNRVRLPSTENIAKAGIALARELSVAGFDWKDLLKKEEHEEYIDLIELHKT
ALALLLAVTETQLDISALDFVENGTVKDFMKTRDGNLVLEGRFLEMFSQSIVESELRGLA
GLMSRKEFITRSAIQTMNGKQAELLYIPHEFQSAKITTPKEMSRAFLDLAPAEFATSLEP
ESLSEKSLLKLKQMRYYPHYFGYELTRTGQGIDGGVAENALRLEKSPVKKREIKCKQYKT
LGRGQNKIVLYVRSSYYQTQFLEWFLHRPKNVQTDVAVSGSFLIDEKKVKTRWNYDALTV
ALEPVSGSERVFVSQPFTIFPEKSAEEEGQRYLGIDIGEYGIAYTALEITGDSAKILDQN
FISDPQLKTLREEVKGLKLDQRRGTFAMPSTKIARIRESLVHSLRNRIHHLALKHKAKIV
YELEVSRFEEGKQKIKKVYATLKKADVYSEIDADKNLQTTVWGKLAVASEISASYTSQFC
GACKKLWRAEMQVDETITTQELIGTVRVIKGGTLIDAIKDFMRPPIFDENDTPFPKYRDF
CDKHHISKKMRGNSCLFICPFCRANADADIQASQTIALLRYVKEEKKVEDYFERFRKLKN
IKVLGQMKKI (SEQ ID NO: 158)
Candidatus Komeilibacteria Cas12d (CasY.5) MOEI01000022
MAESKQMQCRKCGASMKYEVIGLGKKSCRYMCPDCGNHTSARKIQNKKKRD
KKYGSASKAQSQRIAVAGALYPDKKVQTIKTYKYPADLNGEVHDSGVAEKIAQAIQEDEI
GLLGPSSEYACWIASQKQSEPYSVVDFWFDAVCAGGVFAYSGARLLSTVLQLSGEESVLR
AALASSPFVDDINLAQAEKFLAVSRRTGQDKLGKRIGECFAEGRLEALGIKDRMREFVQA
IDVAQTAGQRFAAKLKIFGISQMPEAKQWNNDSGLTVCILPDYYVPEENRADQLVVLLRR
LREIAYCMGIEDEAGFEHLGIDPGALSNFSNGNPKRGFLGRLLNNDIIALANNMSAMTPY
WEGRKGELIERLAWLKHRAEGLYLKEPHFGNSWADHRSRIFSRIAGWLSGCAGKLKIAKD
QISGVRTDLFLLKRLLDAVPQSAPSPDFIASISALDRFLEAAESSQDPAEQVRALYAFHL
NAPAVRSIANKAVQRSDSQEWLIKELDAVDHLEFNKAFPFFSDTGKKKKKGANSNGAPSE
EEYTETESIQQPEDAEQEVNGQEGNGASKNQKKFQRIPRFFGEGSRSEYRILTEAPQYFD
MFCNNMRAIFMQLESQPRKAPRDFKCFLQNRLQKLYKQTFLNARSNKCRALLESVLISWG
EFYTYGANEKKFRLRHEASERSSDPDYVVQQALEIARRLFLFGFEWRDCSAGERVDLVEI
HKKAISFLLAITQAEVSVGSYNWLGNSTVSRYLSVAGTDTLYGTQLEEFLNATVLSQMRG
LAIRLSSQELKDGFDVQLESSCQDNLQHLLVYRASRDLAACKRATCPAELDPKILVLPVG
AFIASVMKMIERGDEPLAGAYLRHRPHSFGWQIRVRGVAEVGMDQGTALAFQKPTESEPF
KIKPFSAQYGPVLWLNSSSYSQSQYLDGFLSQPKNWSMRVLPQAGSVRVEQRVALIWNLQ
AGKMRLERSGARAFFMPVPFSFRPSGSGDEAVLAPNRYLGLFPHSGGIEYAVVDVLDSAG
FKILERGTIAVNGFSQKRGERQEEAHREKQRRGISDIGRKKPVQAEVDAANELHRKYTDV
ATRLGCRIVVQWAPQPKPGTAPTAQTVYARAVRTEAPRSGNQEDHARMKSSWGYTWGTYW
EKRKPEDILGISTQVYWTGGIGESCPAVAVALLGHIRATSTQTEWEKEEVVFGRLKKFFP
S (SEQ ID NO: 159)
Candidatus Kerfeldbacteria Cas12d (CasY.6) MHKD01000036
MAESKQMQCRKCGASMKYEVIGLGKKSCRYMCPDCGNHTSARKIQNKKKRD
KKYGSASKAQSQRIAVAGALYPDKKVQTIKTYKYPADLNGEVHDRGVAEKIEQAIQEDEI
GLLGPSSEYACWIASQKQSEPYSVVDFWFDAVCAGGVFAYSGARLLSTVLQLSGEESVLR
AALASSPFVDDINLAQAEKFLAVSRRTGQDKLGKRIGECFAEGRLEALGIKDRMREFVQA
IDVAQTAGQRFAAKLKIFGISQMPEAKQWNNDSGLTVCILPDYYVPEENRADQLVVLLRR
LREIAYCMGIEDEAGFEHLGIDPGALSNFSNGNPKRGFLGRLLNNDIIALANNMSAMTPY
WEGRKGELIERLAWLKHRAEGLYLKEPHFGNSWADHRSRIFSRIAGWLSGCAGKLKIAKD
QISGVRTDLFLLKRLLDAVPQSAPSPDFIASISALDRFLEAAESSQDPAEQVRALYAFHL
NAPAVRSIANKAVQRSDSQEWLIKELDAVDHLEFNKAFPFFSDTGKKKKKGANSNGAPSE
EEYTETESIQQPEDAEQEVNGQEGNGASKNQKKFQRIPRFFGEGSRSEYRILTEAPQYFD
MFCNNMRAIFMQLESQPRKAPRDFKCFLQNRLQKLYKQTFLNARSNKCRALLESVLISWG
EFYTYGANEKKFRLRHEASERSSDPDYVVQQALEIARRLFLFGFEWRDCSAGERVDLVEI
HKKAISFLLAITQAEVSVGSYNWLGNSTVSRYLSVAGTDTLYGTQLEEFLNATVLSQMRG
LAIRLSSQELKDGFDVQLESSCQDNLQHLLVYRASRDLAACKRATCPAELDPKILVLPAG
AFIASVMKMIERGDEPLAGAYLRHRPHSFGWQIRVRGVAEVGMDQGTALAFQKPTESEPF
KIKPFSAQYGPVLWLNSSSYSQSQYLDGFLSQPKNWSMRVLPQAGSVRVEQRVALIWNLQ
AGKMRLERSGARAFFMPVPFSFRPSGSGDEAVLAPNRYLGLFPHSGGIEYAVVDVLDSAG
FKILERGTIAVNGFSQKRGERQEEAHREKQRRGISDIGRKKPVQAEVDAANELHRKYTDV
ATRLGCRIVVQWAPQPKPGTAPTAQTVYARAVRTEAPRSGNQEDHARMKSSWGYTWSTYW
EKRKPEDILGISTQVYWTGGIGESCPAVAVALLGHIRATSTQTEWEKEEVVFGRLKKFFP
S (SEQ ID NO: 160)
Cas12e (CasX)
>Deltaproteobacteria bacterium GWA2_43_19 Cas12e1 (CasX1)
MEKRINKIRKKLSADNATKPVSRSGPMKTLLVRVMTDDLKKRLEKRRKKPEVMPQVISNNAANN
LRMLLDDYTKMKEAILQVYWQEFKDDHVGLMCKFAQPASKKIDQNKLKPEMDEKGNLTTAGFAC
SQCGQPLFVYKLEQVSEKGKAYTNYFGRCNVAEHEKLILLAQLKPEKDSDEAVTYSLGKFGQRA
LDFYSIHVTKESTHPVKPLAQIAGNRYASGPVGKALSDACMGTIASFLSKYQDIIIEHQKVVKG
NQKRLESLRELAGKENLEYPSVTLPPQPHTKEGVDAYNEVIARVRMWVNLNLWQKLKLSRDDAK
PLLRLKGFPSFPVVERRENEVDWWNTINEVKKLIDAKRDMGRVFWSGVTAEKRNTILEGYNYLP
NENDHKKREGSLENPKKPAKRQFGDLLLYLEKKYAGDWGKVFDEAWERIDKKIAGLTSHIEREE
ARNAEDAQSKAVLTDWLRAKASFVLERLKEMDEKEFYACEIQLQKWYGDLRGNPFAVEAENRVV
DISGFSIGSDGHSIQYRNLLAWKYLENGKREFYLLMNYGKKGRIRFTDGTDIKKSGKWQGLLYG
GGKAKVIDLTFDPDDEQLIILPLAFGTRQGREFIWNDLLSLETGLIKLANGRVIEKTIYNKKIG
RDEPALFVALTFERREVVDPSNIKPVNLIGVDRGENIPAVIALTDPEGCPLPEFKDSSGGPTDI
LRIGEGYKEKQRAIQAAKEVEQRRAGGYSRKFASKSRNLADDMVRNSARDLFYHAVTHDAVLVF
ENLSRGFGRQGKRTFMTERQYTKMEDWLTAKLAYEGLTSKTYLSKTLAQYTSKTCSNCGFTITT
ADYDGMLVRLKKTSDGWATTLNNKELKAEGQITYYNRYKRQTVEKELSAELDRLSEESGNNDIS
KWTKGRRDEALFLLKKRFSHRPVQEQFVCLDCGHEVHADEQAALNIARSWLFLNSNSTEFKSYK
SGKQPFVGAWQAFYKRRLKEVWKPNA (SEQ ID NO: 161)
>Plantomycetes bacterium Cas12e (CasX2)
MQEIKRINKIRRRLVKDSNTKKAGKTGPMKTLLVRVMTPDLRERLENLRKKPENIPQPISNTSR
ANLNKLLTDYTEMKKAILHVYWEEFQKDPVGLMSRVAQPAPKNIDQRKLIPVKDGNERLTSSGF
ACSQCCQPLYVYKLEQVNDKGKPHTNYFGRCNVSEHERLILLSPHKPEANDELVTYSLGKFGQR
ALDFYSIHVTRESNHPVKPLEQIGGNSCASGPVGKALSDACMGAVASFLTKYQDIILEHQKVIK
KNEKRLANLKDIASANGLAFPKITLPPQPHTKEGIEAYNNVVAQIVIWVNLNLWQKLKIGRDEA
KPLQRLKGFPSFPLVERQANEVDWWDMVCNVKKLINEKKEDGKVFWQNLAGYKRQEALLPYLSS
EEDRKKGKKFARYQFGDLLLHLEKKHGEDWGKVYDEAWERIDKKVEGLSKHIKLEEERRSEDAQ
SKAALTDWLRAKASFVIEGLKEADKDEFCRCELKLQKWYGDLRGKPFAIEAENSILDISGFSKQ
YNCAFIWQKDGVKKLNLYLIINYFKGGKLRFKKIKPEAFEANRFYTVINKKSGEIVPMEVNENF
DDPNLIILPLAFGKRQGREFIWNDLLSLETGSLKLANGRVIEKTLYNRRTRQDEPALFVALTFE
RREVLDSSNIKPMNLIGIDRGENIPAVIALTDPEGCPLSRFKDSLGNPTHILRIGESYKEKQRT
IQAAKEVEQRRAGGYSRKYASKAKNLADDMVRNTARDLLYYAVTQDAMLIFENLSRGFGRQGKR
TEMAERQYTRMEDWLTAKLAYEGLPSKTYLSKTLAQYTSKTCSNCGFTITSADYDRVLEKLKKT
ATGWMTTINGKELKVEGQITYYNRYKRQNVVKDLSVELDRLSEESVNNDISSWTKGRSGEALSL
LKKRFSHRPVQEKFVCLNCGFETHADEQAALNIARSWLFLRSQEYKKYQTNKTTGNTDKRAFVE
TWQSFYRKKLKEVWKPAV (SEQ ID NO: 162)
>Cas12e3 (CasX3)
MDNANKPSTKSLVNTTRISDHFGVTPGQVTRVFSFGIIPTKRQYAIIERWFAAVEAARERLYGM
LYAHFQENPPAYLKEKFSYETFFKGRPVLNGLRDIDPTIMTSAVFTALRHKAEGAMAAFHTNHR
RLFEEARKKMREYAECLKANEALLRGAADIDWDKIVNALRTRLNTCLAPEYDAVIADFGALCAF
RALIAETNALKGAYNHALNQMLPALVKVDEPEEAEESPRLRFFNGRINDLPKFPVAERETPPDT
ETIIRQLEDMARVIPDTAEILGYIHRIRHKAARRKPGSAVPLPQRVALYCAIRMERNPEEDPST
VAGHFLGEIDRVCEKRRQGLVRTPFDSQIRARYMDIISFRATLAHPDRWTEIQFLRSNAASRRV
RAETISAPFEGFSWTSNRTNPAPQYGMALAKDANAPADAPELCICLSPSSAAFSVREKGGDLIY
MRPTGGRRGKDNPGKEITWVPGSFDEYPASGVALKLRLYFGRSQARRMLTNKTWGLLSDNPRVE
AANAELVGKKRNPQDRWKLFFHMVISGPPPVEYLDFSSDVRSRARTVIGINRGEVNPLAYAVVS
VEDGQVLEEGLLGKKEYIDQLIETRRRISEYQSREQTPPRDLRQRVRHLQDTVLGSARAKIHSL
IAFWKGILAIERLDDQFHGREQKIIPKKTYLANKTGFMNALSFSGAVRVDKKGNPWGGMIEIYP
GGISRTCTQCGTVWLARRPKNPGHRDAMVVIPDIVDDAAATGFDNVDCDAGTVDYGELFTLSRE
WVRLTPRYSRVMRGTLGDLERAIRQGDDRKSRQMLELALEPQPQWGQFFCHRCGENGQSDVLAA
TNLARRAISLIRRLPDTDTPPTP (SEQ ID NO: 163)
Cas12J
Cas12J_1947455
MADTPTLFTQFLRHHLPGQRFRKDILKQAGRILANKGEDATIAFLRGKSEESPPDFQPP
VKCPIIACSRPLTEWPIYQASVAIQGYVYGQSLAEFEASDPGCSKDGLLGWFDKTGVCTDYFSV
QGLNLIFQNARKRYIGVQTKVTNRNEKRHKKLKRINAKRIAEGLPELTSDEPESALDETGHLIDP
PGLNTNIYCYQQVSPKPLALSEVNQLPTAYAGYSTSGDDPIQPMVTKDRLSISKGQPGYIPEHQ
RALLSQKKHRRMRGYGLKARALLVIVRIQDDWAVIDLRSLLRNAYWRRIVQTKEPSTITKLLKLV
TGDPVLDATRMVATFTYKPGIVQVRSAKCLKNKQGSKLFSERYLNETVSVTSIDLGSNNLVAVA
TYRLVNGNTPELLQRFTLPSHLVKDFERYKQAHDTLEDSIQKTAVASLPQGQQTEIRMWSMYG
FREAQERVCQELGLADGSIPWNVMTATSTILTDLFLARGGDPKKCMFTSEPKKKKNSKQVLYKI
RDRAWAKMYRTLLSKETREAWNKALWGLKRGSPDYARLSKRKEELARRCVNYTISTAEKRAQ
CGRTIVALEDLNIGFFHGRGKQEPGWVGLFTRKKENRWLMQALHKAFLELAHHRGYHVIEVNP
AYTSQTCPVCRHCDPDNRDQHNREAFHCIGCGFRGNADLDVATHNIAMVAITGESLKRARGS
VASKTPQPLAAE* (SEQ ID NO: 164)
Cas12J_2071242
MPKPAVESEFSKVLKKHFPGERFRSSYMKRGGKILAAQGEEAVVAYLQGKSEEEPPNF
QPPAKCHVVTKSRDFAEWPIMKASEAIQRYIYALSTTERAACKPGKSSESHAAWFAATGVSNH
GYSHVQGLNLIFDHTLGRYDGVLKKVQLRNEKARARLESINASRADEGLPEIKAEEEEVATNET
GHLLQPPGINPSFYVYQTISPQAYRPRDEIVLPPEYAGYVRDPNAPIPLGVVRNRCDIQKGCPG
YIPEWQREAGTAISPKTGKAVTVPGLSPKKNKRMRRYWRSEKEKAQDALLVTVRIGTDWVVID
VRGLLRNARWRTIAPKDISLNALLDLFTGDPVIDVRRNIVTFTYTLDACGTYARKWTLKGKQTKA
TLDKLTATQTVALVAIDLGQTNPISAGISRVTQENGALQCEPLDRFTLPDDLLKDISAYRIAWDRN
EEELRARSVEALPEAQQAEVRALDGVSKETARTQLCADFGLDPKRLPWDKMSSNTTFISEALL
SNSVSRDQVFFTPAPKKGAKKKAPVEVMRKDRTWARAYKPRLSVEAQKLKNEALWALKRTSP
EYLKLSRRKEELCRRSINYVIEKTRRRTQCQIVIPVIEDLNVRFFHGSGKRLPGWDNFFTAKKEN
RWFIQGLHKAFSDLRTHRSFYVFEVRPERTSITCPKCGHCEVGNRDGEAFQCLSCGKTCNADL
DVATHNLTQVALTGKTMPKREEPRDAQGTAPARKTKKASKSKAPPAEREDQTPAQEPSQTS (SEQ ID NO: 165)
Cas12J_1973640
MYILEMADLKSEPSLLAKLLRDRFPGKYWLPKYWKLAEKKRLTGGEEAACEYMADKQL
DSPPPNFRPPARCVILAKSRPFEDWPVHRVASKAQSFVIGLSEQGFAALRAAPPSTADARRDW
LRSHGASEDDLMALEAQLLETIMGNAISLHGGVLKKIDNANVKAAKRLSGRNEARLNKGLQELP
PEQEGSAYGADGLLVNPPGLNLNIYCRKSCCPKPVKNTARFVGHYPGYLRDSDSILISGTMDRL
TIIEGMPGHIPAWQREQGLVKPGGRRRRLSGSESNMRQKVDPSTGPRRSTRSGTVNRSNQRT
GRNGDPLLVEIRMKEDWVLLDARGLLRNLRWRESKRGLSCDHEDLSLSGLLALFSGDPVIDPV
RNEVVFLYGEGIIPVRSTKPVGTRQSKKLLERQASMGPLTLISCDLGQTNLIAGRASAISLTHGS
LGVRSSVRIELDPEIIKSFERLRKDADRLETEILTAAKETLSDEQRGEVNSHEKDSPQTAKASLC
RELGLHPPSLPWGQMGPSTTFIADMLISHGRDDDAFLSHGEFPTLEKRKKFDKRFCLESRPLLS
SETRKALNESLWEVKRTSSEYARLSQRKKEMARRAVNFVVEISRRKTGLSNVIVNIEDLNVRIFH
GGGKQAPGWDGFFRPKSENRWFIQAIHKAFSDLAAHHGIPVIESDPQRTSMTCPECGHCDSK
NRNGVRFLCKGCGASMDADFDAACRNLERVALTGKPMPKPSTSCERLLSATTGKVCSDHSLS
HDAIEKAS* (SEQ ID NO: 166)
Cas12J_3339380
MEKEITELTKIRREFPNKKFSSTDMKKAGKLLKAEGPDAVRDFLNSCQEIIGDFKPPVKT
NIVSISRPFEEWPVSMVGRAIQEYYFSLTKEELESVHPGTSSEDHKSFFNITGLSNYNYTSVQGL
NLIFKNAKAIYDGTLVKANNKNKKLEKKFNEINHKRSLEGLPIITPDFEEPFDENGHLNNPPGINR
NIYGYQGCAAKVFVPSKHKMVSLPKEYEGYNRDPNLSLAGFRNRLEIPEGEPGHVPWFQRMDI
PEGQIGHVNKIQRFNFVHGKNSGKVKFSDKTGRVKRYHHSKYKDATKPYKFLEESKKVSALDSI
LAIITIGDDWVVFDIRGLYRNVFYRELAQKGLTAVQLLDLFTGDPVIDPKKGVVTFSYKEGVVPVF
SQKIVPRFKSRDTLEKLTSQGPVALLSVDLGQNEPVAARVCSLKNINDKITLDNSCRISFLDDYK
KQIKDYRDSLDELEIKIRLEAINSLETNQQVEIRDLDVFSADRAKANTVDMFDIDPNLISWDSMSD
ARVSTQISDLYLKNGGDESRVYFEINNKRIKRSDYNISQLVRPKLSDSTRKNLNDSIWKLKRTSE
EYLKLSKRKLELSRAVVNYTIRQSKLLSGINDIVIILEDLDVKKKENGRGIRDIGWDNFFSSRKEN
RWFIPAFHKAFSELSSNRGLCVIEVNPAWTSATCPDCGFCSKENRDGINFTCRKCGVSYHADI
DVATLNIARVAVLGKPMSGPADRERLGDTKKPRVARSRKTMKRKDISNSTVEAMVTA* (SEQ ID NO: 167)
Cas12J_10037042_3
MDMLDTETNYATETPAQQQDYSPKPPKKAQRAPKGFSKKARPEKKPPKPITLFTQKHF
SGVRFLKRVIRDASKILKLSESRTITFLEQAIERDGSAPPDVTPPVHNTIMAVTRPFEEWPEVILS
KALQKHCYALTKKIKIKTWPKKGPGKKCLAAWSARTKIPLIPGQVQATNGLFDRIGSIYDGVEKK
VTNRNANKKLEYDEAIKEGRNPAVPEYETAYNIDGTLINKPGYNPNLYITQSRTPRLITEADRPLV
EKILWQMVEKKTQSRNQARRARLEKAAHLQGLPVPKFVPEKVDRSQKIEIRIIDPLDKIEPYMPQ
DRMAIKASQDGHVPYWQRPFLSKRRNRRVRAGWGKQVSSIQAWLTGALLVIVRLGNEAFLADI
RGALRNAQWRKLLKPDATYQSLFNLFTGDPVVNTRINHLTMAYREGVVNIVKSRSFKGRQTR
EHLLTLLGQGKTVAGVSFDLGQKHAAGLLAAHFGLGEDGNPVFTPIQACFLPQRYLDSLTNYR
NRYDALTLDMRRQSLLALTPAQQQEFADAQRDPGGQAKRACCLKLNLNPDEIRWDLVSGIST
MISDLYIERGGDPRDVHQQVETKPKGKRKSEIRILKIRDGKWAYDFRPKIADETRKAQREQLWK
LQKASSEFERLSRYKINIARAIANWALQWGRELSGCDIVIPVLEDLNVGSKFFDGKGKWLLGWD
NRFTPKKENRWFIKVLHKAVAELAPHRGVPVYEVMPHRTSMTCPACHYCHPTNREGDRFECQ
SCHVVKNTDRDVAPYNILRVAVEGKTLDRWQAEKKPQAEPDRPMILIDNQES* (SEQ ID NO: 168)
Cas12J_10020921_9
MDMLDTETNYATETPAQQQDYSPKPPKKAQRAPKGFSKKARPEKKPPKPITLFTQKHF
SGVRFLKRVIRDASKILKLSESRTITFLEQAIERDGSAPPDVTPPVHNTIMAVTRPFEEWPEVILS
KALQKHCYALTKKIKIKTWPKKGPGKKCLAAWSARTKIPLIPGQVQATNGLEDRIGSIYDGVEKK
VTNRNANKKLEYDEAIKEGRNPAVPEYETAYNIDGTLINKPGYNPNLYITQSRTPRLITEADRPLV
EKILWQMVEKKTQSRNQARRARLEKAAHLQGLPVPKFVPEKVDRSQKIEIRIIDPLDKIEPYMPQ
DRMAIKASQDGHVPYWQRPFLSKRRNRRVRAGWGKQVSSIQAWLTGALLVIVRLGNEAFLADI
RGALRNAQWRKLLKPDATYQSLFNLFTGDPVVNTRTNHLTMAYREGVVDIVKSRSFKGRQTR
EHLLTLLGQGKTVAGVSFDLGQKHAAGLLAAHFGLGEDGNPVFTPIQACFLPQRYLDSLTNYR
NRYDALTLDMRRQSLLALTPAQQQEFADAQRDPGGQAKRACCLKLNLNPDEIRWDLVSGIST
MISDLYIERGGDPRDVHQQVETKPKGKRKSEIRILKIRDGKWAYDFRPKIADETRKAQREQLWK
LQKASSEFERLSRYKINIARAIANWALQWGRELSGCDIVIPVLEDLNVGSKFFDGKGKWLLGWD
NRFTPKKENRWFIKVLHKAVAELAPHKGVPVYEVMPHRTSMTCPACHYCHPTNREGDRFECQ
SCHVVKNTDRDVAPYNILRVAVEGKTLDRWQAEKKPQAEPDRPMILIDNQES* (SEQ ID NO: 169)
Cas12J_10000002_47
MSSLPTPLELLKQKHADLFKGLQFSSKDNKMAGKVLKKDGEEAALAFLSERGVSRGEL
PNFRPPAKTLVVAQSRPFEEFPIYRVSEAIQLYVYSLSVKELETVPSGSSTKKEHQRFFQDSSV
PDFGYTSVQGLNKIFGLARGIYLGVITRGENQLQKAKSKHEALNKKRRASGEAETEFDPTPYEY
MTPERKLAKPPGVNHSIMCYVDISVDEFDFRNPDGIVLPSEYAGYCREINTAIEKGTVDRLGHLK
GGPGYIPGHQRKESTTEGPKINFRKGRIRRSYTALYAKRDSRRVRQGKLALPSYRHHMMRLNS
NAESAILAVIFFGKDWVVFDLRGLLRNVRWRNLFVDGSTPSTLLGMFGDPVIDPKRGVVAFCYK
EQIVPVVSKSITKMVKAPELLNKLYLKSEDPLVLVAIDLGQTNPVGVGVYRVMNASLDYEVVTRF
ALESELLREIESYRQRTNAFEAQIRAETFDAMTSEEQEEITRVRAFSASKAKENVCHRFGMPVD
AVDWATMGSNTIHIAKWVMRHGDPSLVEVLEYRKDNEIKLDKNGVPKKVKLTDKRIANLTSIRL
RFSQETSKHYNDTMWELRRKHPVYQKLSKSKADFSRRVVNSIIRRVNHLVPRARIVFIIEDLKNL
GKVFHGSGKRELGWDSYFEPKSENRWFIQVLHKAFSETGKHKGYYIIECWPNWTSCTCPKCS
CCDSENRHGEVFRCLACGYTCNTDFGTAPDNLVKIATTGKGLPGPKKRCKGSSKGKNPKIARS
SETGVSVTESGAPKVKKSSPTQTSQSSSQSAP* (SEQ ID NO: 170)
Cas12J_10100763_4
MNKIEKEKTPLAKLMNENFAGLRFPFAIIKQAGKKLLKEGELKTIEYMTGKGSIEPLPNFK
PPVKCLIVAKRRDLKYFPICKASCEIQSYVYSLNYKDFMDYFSTPMTSQKQHEEFFKKSGLNIEY
QNVAGLNLIFNNVKNTYNGVILKVKNRNEKLKKKAIKNNYEFEEIKTENDDGCLINKPGINNVIYC
FQSISPKILKNITHLPKEYNDYDCSVDRNIIQKYVSRLDIPESQPGHVPEWQRKLPEFNNTNNPR
RRRKWYSNGRNISKGYSVDQVNQAKIEDSLLAQIKIGEDWIILDIRGLLRDLNRRELISYKNKLTI
KDVLGFFSDYPIIDIKKNLVTFCYKEGVIQVVSQKSIGNKKSKQLLEKLIENKPIALVSIDLGQTNP
VSVKISKLNKINNKISIESFTYRFLNEEILKEIEKYRKDYDKLELKLINEA (SEQ ID NO: 171)
Cas12J_10004149_10
MDMLDTETNYATETPSQQQDYSPKPPKKDRRAPKGFSKKARPEKKPPKPITLFTQKHF
SGVRFLKRVIRDASKILKLSESRTITFLEQAIERDGSAPPDVTPPVHNTIMAVTRPFEEWPEVILS
KALQKHCYALTKKIKIKTWPKKGPGKKCLAAWSARTKIPLIPGQVQATNGLFDRIGSIYDGVEKK
VTNRNANKKLEYDEAIKEGRNPAVPEYETAYNIDGTLINKPGYNPNLYITQSRTPRLITEADRPLV
EKILWQMVEKKTQSRNQARRARLEKAAHLQGLPVPKFVPEKVDRSQKIEIRIIDPLDKIEPYMPQ
DRMAIKASQDGHVPYWQRPFLSKRRNRRVRAGWGKQVSSIQAWLTGALLVIVRLGNEAFLADI
RGALRNAQWRKLLKPDATYQSLFNLFTGDPVVNTRINHLTMAYREGVVDIVKSRSFKGRQTR
EHLLTLLGQGKTVAGVSFDLGQKHAAGLLAAHFGLGEDGNPVFTPIQACFLPQRYLDSLTNYR
NRYDALTLDMRRQSLLALTPAQQQEFADAQRDPGGQAKRACCLKLNLNPDEIRWDLVSGIST
MISDLYIERGGDPRDVHQQVETKPKGKRKSEIRILKIRDGKWAYDFRPKIADETRKAQREQLWK
LQKASSEFERLSRYKINIARAIANWALQWGRELSGCDIVIPVLEDLNVGSKFFDGKGKWLLGWD
NRFTPKKENRWFIKVLHKAVAELAPHRGVPVYEVMPHRTSMTCPACHYCHPTNREGDRFECQ
SCHVVKNTDRDVAPYNILRVAVEGKTLDRWQAEKKPQAEPDRPMILIDNQES* (SEQ ID NO: 172)
Cas12J_10000724_71
MDMLDTETNYATETPSQQQDYSPKPPKKDRRAPKGFSKKARPEKKPPKPITLFTQKHF
SGVRFLKRVIRDASKILKLSESRTITFLEQAIERDGSAPPDVTPPVHNTIMAVTRPFEEWPEVILS
KALQKHCYALTKKIKIKTWPKKGPGKKCLAAWSARTKIPLIPGQVQATNGLEDRIGSIYDGVEKK
VTNRNANKKLEYDEAIKEGRNPAVPEYETAYNIDGTLINKPGYNPNLYITQSRTPRLITEADRPLV
EKILWQMVEKKTQSRNQARRARLEKAAHLQGLPVPKFVPEKVDRSQKIEIRIIDPLDKIEPYMPQ
DRMAIKASQDGHVPYWQRPFLSKRRNRRVRAGWGKQVSSIQAWLTGALLVIVRLGNEAFLADI
RGALRNAQWRKLLKPDATYQSLFNLFTGDPVVNTRINHLTMAYREGVVNIVKSRSFKGRQTR
EHLLTLLGQGKTVAGVSFDLGQKHAAGLLAAHFGLGEDGNPVFTPIQACFLPQRYLDSLTNYR
NRYDALTLDMRRQSLLALTPAQQQEFADAQRDPGGQAKRACCLKLNLNPDEIRWDLVSGIST
MISDLYIERGGDPRDVHQQVETKPKGKRKSEIRILKIRDGKWAYDFRPKIADETRKAQREQLWK
LQKASSEFERLSRYKINIARAIANWALQWGRELSGCDIVIPVLEDLNVGSKFFDGKGKWLLGWD
NRFTPKKENRWFIKVLHKAVAELAPHRGVPVYEVMPHRTSMTCPACHYCHPTNREGDRFECQ
SCHVVKNTDRDVAPYNILRVAVEGKTLDRWQAEKKPQAEPDRPMILIDNQES* (SEQ ID NO: 173)
Cas12J_1000001_267
MSNTAVSTREHMSNKTTPPSPLSLLLRAHFPGLKFESQDYKIAGKKLRDGGPEAVISYL
TGKGQAKLKDVKPPAKAFVIAQSRPFIEWDLVRVSRQIQEKIFGIPATKGRPKQDGLSETAFNEA
VASLEVDGKSKLNEETRAAFYEVLGLDAPSLHAQAQNALIKSAISIREGVLKKVENRNEKNLSKT
KRRKEAGEEATFVEEKAHDERGYLIHPPGVNQTIPGYQAVVIKSCPSDFIGLPSGCLAKESAEA
LTDYLPHDRMTIPKGQPGYVPEWQHPLLNRRKNRRRRDWYSASLNKPKATCSKRSGTPNRK
NSRTDQIQSGRFKGAIPVLMRFQDEWVIIDIRGLLRNARYRKLLKEKSTIPDLLSLFTGDPSIDMR
QGVCTFIYKAGQACSAKMVKTKNAPEILSELTKSGPVVLVSIDLGQTNPIAAKVSRVTQLSDGQL
SHETLLRELLSNDSSDGKEIARYRVASDRLRDKLANLAVERLSPEHKSEILRAKNDTPALCKARV
CAALGLNPEMIAWDKMTPYTEFLATAYLEKGGDRKVATLKPKNRPEMLRRDIKFKGTEGVRIEV
SPEAAEAYREAQWDLQRTSPEYLRLSTWKQELTKRILNQLRHKAAKSSQCEVVVMAFEDLNIK
MMHGNGKWADGGWDAFFIKKRENRWFMQAFHKSLTELGAHKGVPTIEVTPHRTSITCTKCGH
CDKANRDGERFACQKCGFVAHADLEIATDNIERVALTGKPMPKPESERSGDAKKSVGARKAAF
KPEEDAEAAE* (SEQ ID NO: 174)
Cas12J_10000286_53
MIKPTVSQFLTPGFKLIRNHSRTAGLKLKNEGEEACKKFVRENEIPKDECPNFQGGPAIA
NIIAKSREFTEWEIYQSSLAIQEVIFTLPKDKLPEPILKEEWRAQWLSEHGLDTVPYKEAAGLNLII
KNAVNTYKGVQVKVDNKNKNNLAKINRKNEIAKLNGEQEISFEEIKAFDDKGYLLQKPSPNKSIY
CYQSVSPKPFITSKYHNVNLPEEYIGYYRKSNEPIVSPYQFDRLRIPIGEPGYVPKWQYTFLSKK
ENKRRKLSKRIKNVSPILGIICIKKDWCVFDMRGLLRTNHWKKYHKPTDSINDLFDYFTGDPVIDT
KANVVRFRYKMENGIVNYKPVREKKGKELLENICDQNGSCKLATVDVGQNNPVAIGLFELKKV
NGELTKTLISRHPTPIDFCNKITAYRERYDKLESSIKLDAIKQLTSEQKIEVDNYNNNFTPQNTKQI
VCSKLNINPNDLPWDKMISGTHFISEKAQVSNKSEIYFTSTDKGKTKDVMKSDYKWFQDYKPKL
SKEVRDALSDIEWRLRRESLEFNKLSKSREQDARQLANWISSMCDVIGIENLVKKNNFFGGSG
KREPGWDNFYKPKKENRWWINAIHKALTELSQNKGKRVILLPAMRTSITCPKCKYCDSKNRNG
EKFNCLKCGIELNADIDVATENLATVAITAQSMPKPTCERSGDAKKPVRARKAKAPEFHDKLAP
SYTVVLREAV* (SEQ ID NO: 175)
Cas12J_10001283_7
MRSSREIGDKILMRQPAEKTAFQVFRQEVIGTQKLSGGDAKTAGRLYKQGKMEAARE
WLLKGARDDVPPNFQPPAKCLVVAVSHPFEEWDISKTNHDVQAYIYAQPLQAEGHLNGLSEK
WEDTSADQHKLWFEKTGVPDRGLPVQAINKIAKAAVNRAFGVVRKVENRNEKRRSRDNRIAE
HNRENGLTEVVREAPEVATNADGFLLHPPGIDPSILSYASVSPVPYNSSKHSFVRLPEEYQAYN
VEPDAPIPQFVVEDRFAIPPGQPGYVPEWQRLKCSTNKHRRMRQWSNQDYKPKAGRRAKPL
EFQAHLTRERAKGALLVVMRIKEDWVVFDVRGLLRNVEWRKVLSEEAREKLTLKGLLDLFTGD
PVIDTKRGIVTFLYKAEITKILSKRTVKTKNARDLLLRLTEPGEDGLRREVGLVAVDLGQTHPIAA
AIYRIGRTSAGALESTVLHRQGLREDQKEKLKEYRKRHTALDSRLRKEAFETLSVEQQKEIVTVS
GSGAQITKDKVCNYLGVDPSTLPWEKMGSYTHFISDDFLRRGGDPNIVHFDRQPKKGKVSKKS
QRIKRSDSQWVGRMRPRLSQETAKARMEADWAAQNENEEYKRLARSKQELARWCVNTLLQN
TRCITQCDEIVVVIEDLNVKSLHGKGAREPGWDNFFTPKTENRWFIQILHKTFSELPKHRGEHVI
EGCPLRTSITCPACSYCDKNSRNGEKFVCVACGATFHADFEVATYNLVRLATTGMPMPKSLER
QGGGEKAGGARKARKKAKQVEKIVVQANANVTMNGASLHSP* (SEQ ID NO: 176)
Cas12J_1000002_112
MSSLPTPLELLKQKHADLFKGLQFSSKDNKMAGKVLKKDGEEAALAFLSERGVSRGEL
PNFRPPAKTLVVAQSRPFEEFPIYRVSEAIQLYVYSLSVKELETVPSGSSTKKEHQRFFQDSSV
PDFGYTSVQGLNKIFGLARGIYLGVITRGENQLQKAKSKHEALNKKRRASGEAETEFDPTPYEY
MTPERKLAKPPGVNHSIMCYVDISVDEFDERNPDGIVLPSEYAGYCREINTAIEKGTVDRLGHLK
GGPGYIPGHQRKESTTEGPKINFRKGRIRRSYTALYAKRDSRRVRQGKLALPSYRHHMMRLNS
NAESAILAVIFFGKDWVVFDLRGLLRNVRWRNLFVDGSTPSTLLGMFGDPVIDPKRGVVAFCYK
EQIVPVVSKSITKMVKAPELLNKLYLKSEDPLVLVAIDLGQTNPVGVGVYRVMNASLDYEVVTRF
ALESELLREIESYRQRTNAFEAQIRAETFDAMTSEEQEEITRVRAFSASKAKENVCHRFGMPVD
AVDWATMGSNTIHIAKWVMRHGDPSLVEVLEYRKDNEIKLDKNGVPKKVKLTDKRIANLTSIRL
RFSQETSKHYNDTMWELRRKHPVYQKLSKSKADFSRRVVNSIIRRVNHLVPRARIVFIIEDLKNL
GKVFHGSGKRELGWDSYFEPKSENRWFIQVLHKAFSETGKHKGYYIIECWPNWTSCTCPKCS
CCDSENRHGEVFRCLACGYTCNTDFGTAPDNLVKIATTGKGLPGPKKRCKGSSKGKNPKIARS
SETGVSVTESGAPKVKKSSPTQTSQSSSQSAP* (SEQ ID NO: 177)
Cas12J_10000506_8
MIKPTVSQFLTPGFKLIRNHSRTAGLKLKNEGEEACKKFVRENEIPKDECPNFQGGPAIA
NIIAKSREFTEWEIYQSSLAIQEVIFTLPKDKLPEPILKEEWRAQWLSEHGLDTVPYKEAAGLNLII
KNAVNTYKGVQVKVDNKNKNNLAKINRKNEIAKLNGEQEISFEEIKAFDDKGYLLQKPSPNKSIY
CYQSVSPKPFITSKYHNVNLPEEYIGYYRKSNEPIVSPYQFDRLRIPIGEPGYVPKWQYTELSKK
ENKRRKLSKRIKNVSPILGIICIKKDWCVFDMRGLLRTNHWKKYHKPTDSINDLFDYFTGDPVIDT
KANVVRFRYKMENGIVNYKPVREKKGKELLENICDQNGSCKLATVDVGQNNPVAIGLFELKKV
NGELTKTLISRHPTPIDFCNKITAYRERYDKLESSIKLDAIKQLTSEQKIEVDNYNNNFTPQNTKQI
VCSKLNINPNDLPWDKMISGTHFISEKAQVSNKSEIYFTSTDKGKTKDVMKSDYKWFQDYKPKL
SKEVRDALSDIEWRLRRESLEFNKLSKSREQDARQLANWISSMCDVIGIENLVKKNNFFGGSG
KREPGWDNFYKPKKENRWWINAIHKALTELSQNKGKRVILLPAMRTSITCPKCKYCDSKNRNG
EKFNCLKCGIELNADIDVATENLATVAITAQSMPKPTCERSGDAKKPVRARKAKAPEFHDKLAP
SYTVVLREAV* (SEQ ID NO: 178)
Cas12J_1000007_143
MSNTAVSTREHMSNKTTPPSPLSLLLRAHFPGLKFESQDYKIAGKKLRDGGPEAVISYL
TGKGQAKLKDVKPPAKAFVIAQSRPFIEWDLVRVSRQIQEKIFGIPATKGRPKQDGLSETAFNEA
VASLEVDGKSKLNEETRAAFYEVLGLDAPSLHAQAQNALIKSAISIREGVLKKVENRNEKNLSKT
KRRKEAGEEATFVEEKAHDERGYLIHPPGVNQTIPGYQAVVIKSCPSDFIGLPSGCLAKESAEA
LTDYLPHDRMTIPKGQPGYVPEWQHPLLNRRKNRRRRDWYSASLNKPKATCSKRSGTPNRK
NSRTDQIQSGRFKGAIPVLMRFQDEWVIIDIRGLLRNARYRKLLKEKSTIPDLLSLFTGDPSIDMR
QGVCTFIYKAGQACSAKMVKTKNAPEILSELTKSGPVVLVSIDLGQTNPIAAKVSRVTQLSDGQL
SHETLLRELLSNDSSDGKEIARYRVASDRLRDKLANLAVERLSPEHKSEILRAKNDTPALCKARV
CAALGLNPEMIAWDKMTPYTEFLATAYLEKGGDRKVATLKPKNRPEMLRRDIKFKGTEGVRIEV
SPEAAEAYREAQWDLQRTSPEYLRLSTWKQELTKRILNQLRHKAAKSSQCEVVVMAFEDLNIK
MMHGNGKWADGGWDAFFIKKRENRWFMQAFHKSLTELGAHKGVPTIEVTPHRTSITCTKCGH
CDKANRDGERFACQKCGFVAHADLEIATDNIERVALTGKPMPKPESERSGDAKKSVGARKAAF
KPEEDAEAAE* (SEQ ID NO: 179)
Cas12J_3877103_16
MYSLEMADLKSEPSLLAKLLRDRFPGKYWLPKYWKLAEKKRLTGGEEAACEYMADKQ
LDSPPPNFRPPARCVILAKSRPFEDWPVHRVASKAQSFVIGLSEQGFAALRAAPPSTADARRD
WLRSHGASEDDLMALEAQLLETIMGNAISLHGGVLKKIDNANVKAAKRLSGRNEARLNKGLQEL
PPEQEGSAYGADGLLVNPPGLNLNIYCRKSCCPKPVKNTARFVGHYPGYLRDSDSILISGTMD
RLTIIEGMPGHIPAWQREQGLVKPGGRRRRLSGSESNMRQKVDPSTGPRRSTRSGTVNRSNQ
RTGRNGDPLLVEIRMKEDWVLLDARGLLRNLRWRESKRGLSCDHEDLSLSGLLALFSGDPVID
PVRNEVVFLYGEGIIPVRSTKPVGTRQSKKLLERQASMGPLTLISCDLGQTNLIAGRASAISLTH
GSLGVRSSVRIELDPEIIKSFERLRKDADRLETEILTAAKETLSDEQRGEVNSHEKDSPQTAKAS
LCRELGLHPPSLPWGQMGPSTTFIADMLISHGRDDDAFLSHGEFPTLEKRKKFDKRFCLESRP
LLSSETRKALNESLWEVKRTSSEYARLSQRKKEMARRAVNFVVEISRRKTGLSNVIVNIEDLNV
RIFHGGGKQAPGWDGFFRPKSENRWFIQAIHKAFSDLAAHHGIPVIESDPQRTSMTCPECGHC
DSKNRNGVRFLCKGCGASMDADFDAACRNLERVALTGKPMPKPSTSCERLLSATTGKVCSDH
SLSHDAIEKAS*(SEQ ID NO: 180)
Cas12J_877636_12
MEKEITELTKIRREFPNKKFSSTDMKKAGKLLKAEGPDAVRDFLNSCQEIIGDFKPPVKT
NIVSISRPFEEWPVSMVGRAIQEYYFSLTKEELESVHPGTSSEDHKSFFNITGLSNYNYTSVQGL
NLIFKNAKAIYDGTLVKANNKNKKLEKKFNEINHKRSLEGLPIITPDFEEPFDENGHLNNPPGINR
NIYGYQGCAAKVFVPSKHKMVSLPKEYEGYNRDPNLSLAGFRNRLEIPEGEPGHVPWFQRMDI
PEGQIGHVNKIQRFNFVHGKNSGKVKFSDKTGRVKRYHHSKYKDATKPYKFLEESKKVSALDSI
LAIITIGDDWVVFDIRGLYRNVFYRELAQKGLTAVQLLDLFTGDPVIDPKKGVVTFSYKEGVVPVF
SQKIVPRFKSRDTLEKLTSQGPVALLSVDLGQNEPVAARVCSLKNINDKITLDNSCRISFLDDYK
KQIKDYRDSLDELEIKIRLEAINSLETNQQVEIRDLDVFSADRAKANTVDMFDIDPNLISWDSMSD
ARVSTQISDLYLKNGGDESRVYFEINNKRIKRSDYNISQLVRPKLSDSTRKNLNDSIWKLKRTSE
EYLKLSKRKLELSRAVVNYTIRQSKLLSGINDIVIILEDLDVKKKENGRGIRDIGWDNFFSSRKEN
RWFIPAFHKTFSELSSNRGLCVIEVNPAWTSATCPDCGFCSKENRDGINFTCRKCGVSYHADID
VATLNIARVAVLGKPMSGPADRERLGDTKKPRVARSRKTMKRKDISNSTVEAMVTA*
(SEQ ID NO: 181)
Cas12L Sequences
>Cas12L_1_257905508
MASHKKTESNQIIKTFSFKIKNANGLSLDVLNDAITEYQNYYNICSDWIKDHLTMKISELYKYIPNEKKN
SGYALTLISDEWKDKPMYMMFKKGYPANNRDNAIYETLNTCNTEHYTGNILNFSDTYYRRFGYVASAISN
YVTKISKMSTGSRSKNISNDSDVDTIMEQVIYEMEHNGWTSVKDWENQMEYLESKTDSNPNFVYRMTTLY
EFYKSHIDEVNSKMETMSIDSLIKFGGCRRKDSKKSMYIMGGSNTPFDITQIGGNSLNIKFSKNLNVDVF
GRYDVIKDNTLLVDIINGHGASFVLKIINDEIYIDINVSVPFDKKIATTNKVVGIDVNIKHMLLATNILD
DGNVKGYVNIYKEVINDSDFKKVCNSTVMQYFTDFSKFVTFCPLEFDFLFSRVCNQKGIYNDNSAMEKSF
SDVLNKLKWNFIETGDNTKRIYIENVMKLRSQMKAYAIVKNAYYKQQSEYDFGKSEEFIQEHPFSNTDKG
IEILNKLDNISKKILGCRNNIIQYSYNLFEINGYDMVSLEKLTSSQFKKKPFPTVNSLLKYHKILGCTQE
EMEKKDIYSVIKKGYYDIIFDNDVVTDAKLSAKGELSKFKDDFFNLMIKSIHFADIKDYFITLSNNGTAG
VSLVPSYFTSQMDSIDHKIYFVQDNKSGKLKLANKHKVRSSQEKHINGLNADYNAARNIAYIMENTDCRN
MFMKQSRTDKSLYNKPSYETFIKTQGSAVAKLKKEGFVKILDEASV* (SEQ ID NO: 182)
>Cas12L_2_196848753
MAHKKNVGAEIVKTYSFKVKNTNGITMEKLMNAIDEFQSYYNLCSDWICKNLTTMTIGDLDQYIPEKAKGNTYATVLLD
EAWKNQPLYKIFGKKYSSNNRNNALYCALSSVIDMTKENVLGFSKTHYIRNDYILNVISNYASKLSKLNTGVKSRAIKE
TSDEATIIEQVIYEMEHNKWESIEDWKNQIEYLNSKTDYNPTYMERMKTLSAYYSTHKSEVDAKMQEMAVENLVKFGGC
RRNNSKKSMFIMGSNTTNYTISYIGGNSFNINFANILNFDVYGRRDVVKNGEVLVDIMANHGDSIVLKIVNGELYADVP
CSVTLNKVESNFDKVVGIDVNMKHMLLSTSITDNGSSDFLNIYKEMSNNAEFMALCPEEDRKYYKDISKYVTFAPLELD
LLFSRISKQGKVKMEKVYSEILEALKWKFFANGDNKNRIYVESIQKIRQQIKALCVIKNAYYEQQSAYDIDKTQEYIET
HPFSLTEKGMSIKSKMDKICQTIIGCRNNIIDYAYSFFERNGYSIIGLEKLTSSQFEKTKSMPTCKSLLNFHKVLGHTL
SELETLPINDVVKKGYYTFTTDNEGKITDASLSEKGKVRKMKDDFFNQAIKAIHFADVKDYFATLSNNGQTGIFFVPSQ
FTSQMDSNTHNLYFENAKNGGLKLAPKYKVRQTQEYHLNGLPADYNAARNIAYIGLDETMRNTFLKKANSNKSLYNQPI
YDTGIKKTAGVFSRMKKLKRYEII*. (SEQ ID NO: 183)
>Cas12L_3_66741167
MRISPHLFYIFFKKIWKCHFFVLSLYQLNQYIMASHEKTESNQIIKTFSFKIKNANGLSLDVLNDAITEYQNYYNICSD
WIKDHLTMKIGELYKYIPDEKKNSGYALTLISDEWKDKPMYMMFKKGYPANNRDNAIYETLNTCNTEHYTGNILNFSDT
YYRRFGYVASAISNYVTKISKMSTGSRSKNISNDSDVDTIMEQVIYEMEHNGWTSVKDWENQMEYLESKTDSNPNFVYR
MTTLYEFYKSHIDEVNSKMETMSIDSLIKFGGCRRKDSKKSMYIMGGSNTPFDITQIGGNSLNIKFSKNLNVDVFGRYD
VIKDNTLLVDIINGHGASFVLKIINGEIYIDINVSVPFDKKIATTNKVVGIDVNIKHMLLATNILDDGNVNGYVNIYKE
VINDSDFKKVCNSTVMKYFTDFSKFVTFCPLEFDFLFSRVCNQKGIYNDNSAMEKSFSDVLNKLKWNFIETGDNTKRIY
IENVMKLRSQMKAYAIVKNAYYKQQSEYDFGKSEEFIQEHPFSNTDKGIEILNKLDNISKKILGCRNNIIQYSYNLFEI
NGYDMISLEKLTSSQFKKKPFPTVNSLLKYHKILGCTQEEMEKKDIYSVIKKGYYDIIFDNDVVTDAKLSTKGELSKFK
DDFFNLMIKSIHFADIKDYFITLSNNGTAGVSLVPSYFTSQMDSIDHKIYFVQDNKSGKLKLANKHKVRSSQEKHINGL
NADYNAARNIAYIMENTECRNMFMKQSRTDKSLYNKPSYETFIKTQGSAVAKLKKEGFVKILDEASV* (SEQ ID
NO: 184)
>Cas12L_4_67031163
MRISPHLFYIFFKKIWKSHFFVLSLYQLNQYIMASHKKTESNQIIKTFSFKIKNANGLSLDVLNDAITEYQNYYNICSD
WIKDHLTMKIGELYKYIPDEKKNSGYALTLISDEWKDKPMYMMFKKGYPANNRDNAIYETLNTCNTEHYTGNILNFPDT
YYRRFGYVASTISNYVTKISKMSTGSRSKNISNDSDVDTIMEQVIYEMEHNGWTSVKDWENQMEYLESKTDSNPNFVYR
MTTLYEFYKSHIDEVNSKMETMSIDSLIKFGGCRRKDSKKSMYIMGGSNTPFDITQIGGNSLNIKFSKNLNVDVFGRYD
VIKDNTLLVDIINGHGASFVLKIINGEIYIDINVSVPFDKKIATTNKVVGIDVNIKHMLLATNILDDGNVNGYVNIYKE
VINDSDFKKVCNSTVMKYFTDFSKFVTFCPLEFDFLFSRVCNQKGIYNDNSAMEKSFSDVLNKLKWNFIETGDNTKRIY
IENVMKLRSQMKAYAIVKNAYYKQQSEYDFGKSEEFIQEHPFSNTDKGIEILNKLDNISKKILGCRNNIIQYSYNLFEI
NGYDMISLEKLTSSQFKKNPFPTVNSLLKYHKILGCTQEEMEKKDIYSVIKKGYYDIIFDNDVVTDAKLSTKGELSKFK
DDFFNLMIKSIHFADIKDYFITLSNNGTAGVSLVPSYFTSQMDSIDHKIYFVQDNKSGKLKLANKHKVRSSQEKHINGL
NADYNAARNIAYIMENTECRNMFMKQSRTDKSLYNKPSYETFIKTQGSAVAKLKKEGFVKILDEASV* (SEQ ID
NO: 185)
>Cas12L_5_67793351
MRISPHLFYIFFKKIWKCHIFVLSLYQLNQYIMASHKKTESNQIIKTFSFKIKNANGLSLDVLNDAITEYQNYYNICSD
WIKDHLTMKIGELYKYIPDEKKNSGYALTLISDEWKDKPMYMMFKKGYPANNRDNAIYETLNTCNTEHYTGNILNFSDT
YYRRFGYVASTISNYVTKISKMSTGSRSKNISNDSDVDTIMEQVIYEMEHNGWTSVKDWENQMEYLESKTDSNPNFVYR
MTTLYEFYKSHIDEVNSKMETMSIDSLIKFGGCRRKDSKKSMYIMGGSNTPFDITQIGGNSLNIKFSKNLNVDVFGRYD
VIKDNTLLVDIINGHGASFVLKIINGEIYIDINVSVPFDKKIATTNKVVGVDVNIKHMLLATNILDDGNVNGYVNIYKE
VINDSDFKKVCNSTVMKYFTDFSKFVTFCPLEFDFLFSRVCNQKGIYNDNSAMEKSFSDVLNKLKWNFIETGDNTKRIY
IENVMKLRSQMKAYAIVKNAYYKQQSEYDFGKSEEFIQEHPFSNTDKGIEILNKLDNISKKILGCRNNIIQYSYNLFEI
NGYDMISLEKLTSSQFKKKPFPTVNSLLKYHKILGCTQEEMEKKDIYSVIKKGYYDIIFDNDVVTDAKLSTKGELSKFK
DDFFNLMIKSIHFADIKDYFITLSNNGTAGVSLVPSYFTSQMDSIDHKIYFVQDNKSGKLKLANKHKVRSSQEKHINGL
NADYNAARNIAYIMENTDCRNMFMKQSRTDKSLYNKPSYETFIKTQGSAVAKLKKEGFVKILDEASV* (SEQ ID
NO: 186)
>Cas12L_9_68454124
MASHKKTESNQIIKTFSFKIKNANGLSLDVLNDAITEYQNYYNICSDWIKDHLTMKIGELYKYIPDEKKNSGYALTLIS
DEWKDKPMYMMFKKGYPANNRDNAIYETLNTCNTEHYTGNILNFSDTYYRRFGYVASAISNYVTKISKMSTGSRSKNIS
NDSDVDTIMEQVIYEMEHNGWTSVKDWENQMEYLESKTDSNPNFVYRMTTLYEFYKSHIDEVNSKMETMSIDSLIKFGG
CRRKDSKKSMYIMGGSNTPFDITQIGGNSLNIKFSKNLNVDVFGRYDVIKDNTLLVDIINGHGASFVLKIINGEIYIDI
NVSVPFDKKIATTNKVVGVDVNIKHMLLATNILDDGNVNGYVNIYKEVINDSDFKKVCNSTVMKYFTDFSKFVTFCPLE
FDFLFSRVCNQKGIYNDNSAMEKSFSDVLNKLKWNFIETGDNTKRIYIENVMKLRSQMKAYAIVKNAYYKQQSEYDFGK
SEEFIQEHPFSNTDKGIEILNKLDNISKKILGCRNNIIQYSYNLFEINGYDMISLEKLTSSQFKKKPFPTVNSLLKYHK
ILGCTQEEMEKKDIYSVIKKGYYDIIFDNDVVTDAKLSAKGELSKFKDDFFNLMIKSIHFADIKDYFITLSNNGTAGVS
LVPSYFTSQMDSIDHKIYFVQDNKSGKLKLANKHKVRSSQEKHINGLNADYNAARNIAYIMENTECRNMFMKQSRTDKS
LYNKPSYETFIKTQGSAVSKLKKDGFVKILDEASV* (SEQ ID NO: 187)
>Cas12L_10_68605313
MMKKMRTNPHLFYICFKKIWKCHFFALSLYQLNQYIMASHKKTESNQIIKTFSFKIKNANGLSLDVLNDAITEYQNYYN
ICSDWIKDHLTMKIGELYKYIPDEKKNSGYALTLISDEWKDKPMYMMFKKGYPANSRDNAIYEALNTCNTEHYTGNILN
FSDTYYRRFGYVASTISNYVTKISKMSTGSRSKNISNDSDVDTIMEQVIYEMEHNGWTSVKDWENQMEYLESKTDSNPN
FVYRMTTLYEFYKSHIDEVNSKMETMSIDSLIKFGGCRRKDSKKSMYIMGGSNTPFDITQIGGNSLNIKFSKNLNVDVE
GRYDVIKDNTLLVDIINEHGASFVLKIINDEIYIDINVSVPFDKKIATTNKVVGVDVNIKHMLLATNILDDGNVNGYVN
IYKEVINDSDFKKVCNSTVMKYFTDFSKFVTFCPLEFDFLFSRVCNQKGIYNDNSAMEKSFSDVLNKLKWNFIETGDNT
KRIYIENVMKLRSQMKAYAIVKNAYYKQQSEYDFGKSEEFIQEHPFSNTDKGIEILNKLDNISKKILGCRNNIIQYSYN
LFEINGYDMISLEKLTSSQFKKKPFPTVNSLLKYHKILGCTQEEMEKKDIYSVIKKGYYDIIFDNDVVTDAKLSTKGEL
SKFKDDFFNLMIKSIHFADIKDYFITLSNNGTAGVSLVPSYFTSQMDSIDHKIYFVQDNKSGKLKLANKHKVRSSQEKH
INGLNADYNAARNIAYIMENTECRNMFMKQSRTDKSLYNKPSYETFIKTQGSAVAKLKKEGFVKILDEASA* (SEQ
ID NO: 188)
>Cas12L_13_69733214
MASHKKTESNQIIKTFSFKIKNANGLSLDVLNDAITEYQNYYNICSDWIKDHLTMKIGELYKYIPDEKKNSGYALTLIS
DEWKDKPMYMMFKKGYPANSRDNAIYEALNTCNTEHYTGNILNFSDTYYRRFGYVASTISNYVTKISKMSTGSRSKNIS
NDSDVDTIMEQVIYEMEHNGWTSVKDWENQMEYLESKTDSNPNFVYRMTTLYEFYKSHIDEVNSKMETMSIDSLIKFGG
CRRKDSKKSMYIMGGSNTPFDITQIGGNSLNIKFSKNLNVDVFGRYDVIKDNTLLVDIINGHGASFVLKIINGEIYIDI
NVSVPFDKKIATTNKVVGVDVNIKHMLLATNILDDGNVNGYVNIYKEVINDSDFKKVCNSTVMKYFTDFSKFVTFCPLE
FDFLFSRVCNQKGIYNDNSAMEKSFSDVLNKLKWNFIETGDNTKRIYIENVMKLRSQMKAYAIVKNAYYKQQSEYDFGK
SEEFIQEHPFSNTDKGIEILNKLDNISKKILGCRNNIIQYSYNLFEINGYDMISLEKLTSSQFEKKPFPTVNSLLKYHK
ILGCTQEEMEKKDIYSVIKKGYYDIIFDNDVVTDAKLSTKGELSKFKDDFFNLMIKSIHFADIKDYFITLSNNGTAGVS
LVPSYFTSQMDSIDHKIYFVQDNKSGKLKLANKHKVRSSQEKHINGLNADYNAARNIAYIMENTDCRNMFMKQSRTDKS
LYNKPSYETFIKTQGSAVAKLKKEGFVKILDEASV* (SEQ ID NO: 189)
>Cas12L_15_70724743
MASHKKTESNQIIKTFSFKIKNANGLSLDVLNDAITEYQNYYNICSDWIKDHLTMKIGELYKYIPDEKKNSGYALTLIS
DEWKDKPMYMMFKKGYPANNRDNAIYETLNTCNTEHYTGNILNFSDTYYRRFGYVASAISNYVTKISKMSTGSRSKNIS
NDSDVDTIMEQVIYEMEHNGWTSVKDWENQMEYLESKTDSNPNFVYRMTTLYEFYKSHIDEVNSKMETMSIDSLIKFGG
CRRKDSKKSMYIMGGSNTPFDITQIGGNSLNIKFSKNLNVDVFGRYDVIKDNTLLVDIINGHGASFVLKIINGEIYIDI
NVSVPFDKKIATTNKVVGVDVNIKHMLLATNILDDGNVNGYVNIYKEVINDSDFKKVCNSTVMKYFTDFSKFVTFCPLE
FDFLFSRVCNQKGIYNDNSAMEKSFSDVLNKLKWNFIETGDNTKRIYIENVMKLRSQMKAYAIVKNAYYKQQSEYDFGK
SEEFIQEHPFSNTDKGIEILNKLDNISKKILGCRNNIIQYSYNLFEINGYDMISLEKLTSSQFKKKPFPTVNSLLKYHK
ILGCTQEEMEKKDIYSVIKKGYYDIIFDNDVVTDAKLSTKGELSKFKDDFFNLMIKSIHFADIKDYFITLSNNGTAGVS
LVPSYFTSQMDSIDHKIYFVQDNKSGKLKLANKHKVRSSQEKHINGLNADYNAARNIAYIMENTECRNMFMKQSRTDKS
LYNKPSYETFIKTQGSAVAKLKKEGFVKILDEASV* (SEQ ID NO: 190)
>Cas12L_16_70731038
MAHKKNIGAEIVKTYSFKVKNTNGITMEKLMNAIDEYQSYYNLCSDWICKNLTTMTIGDLDRYIPEKAKDNIYATVLLD
EVWKNQPLYKIFGKKYSSNNRINALYCTLSSVIDINKKNILGLSQTYYARNGYILNVISNYASKLSKLNTGVKRHTIKE
TSDEATIVEQVIYEMEHNKWESIEDWKNQIEYLNSKTDYNPTYMERMKTLSAYYSEHKSEVDAKMQEMAVENLVKFGGC
RRNNSKKSMFIMGSSKTTYTISYIGDNCFNINFANILNFDVYGRRDVVKNGEVLVDIMANHGDSIVLKIVNGELYADVP
CSTTLNKVESTFDKVAGIDVNMKHMLLSTSVTDNGNSDFVNIYKEMSNNAEFMALCPEEDRKYYKDISQYVTFAPLELD
LLFSRISKQGKVKMEKAYSEILEALKWKFFANGDNKNRIYVENIQKIRQQIKALCVIKNAYYEQQSAYDIDKTQEYIEA
HPFSLTEKGMSIKSKMDNICRTIIGCRNNIIDYAYSFFERNDYSIIGLEKLTSSQFEKTKSLPTCKSLLNFHKVLGHTL
SELETLPINDVVKKGYYTFTTDNEGRITDASLSEKGKVRKMKDDFFNQAIKAIHFADVKDYFATLSNNGQTGIFFVPSQ
FTSQMDSNTHTLYFENAKNGGLKLASKYKVRKSQEYHLNGLPADYNAARNIAYIGLDEIMRNTFLKKANSNKSLYNQPI
YDTGIKKTAGVFSRMKKLKKYKVI* (SEQ ID NO: 191)
>Cas12L_17_70959391
MASHKKTESNQIIKTFSFKIKNANGLSLDVLNDAITEYQNYYNICSDWIKDHLTMKIGELYKYIPDEKKNSGYALTLIS
DEWKDKPMYMMFKKGYPANSRDNAIYEALNTCNTEHYTGNILNFSDTYYRRFGYVASTISNYVTKISKMSTGSRSKNIS
NDSDVDTIMEQVIYEMEHNGWTSVKDWENQMEYLESKTDSNPNFVYRMTTLYEFYKSHIDEVNSKMETMSIDSLIKFGG
CRRKDSKKSMYIMGGSNTPFDITQIGGNSLNIKFSKNLNVDVFGRYDVIKDNTLLVDIINGHGASFVLKIINGEIYIDI
NVSVPFDKKIATTNKVVGVDVNIKHMLLATNILDDGNVNGYVNIYKEVINDSDFKKVCNSTVMQYFTDFSKFVTFCPLE
FDFLFSRVCNQKGIYNDNSAMEKSFSDVLNKLKWNFIETGDNTKRIYIENVMKLRSQMKAYAIVKNAYYKQQSEYDFGK
SEEFIQEHPFSNTDKGIEILNKLDNISKKILGCRNNIIQYSYNLFEINGYDMISLEKLTSSQFKKKPFPTVNSLLKYHK
ILGCTQEEMEKKDIYSVIKKGYYDIIFDNDVVTDAKLSTKGELSKFKDDFFNLMIKSIHFADIKDYFITLSNNGTAGVS
LVPSYFTSQMDSIDHKIYFVQDNKSGKLKLANKHKVRSSQEKHINGLNADYNAARNIAYIMENTECRNMFMKQSRTDKS
LYNKPSYETFIKTQGSAVAKLKKEGFVKIIDEASV* (SEQ ID NO: 192)
>Cas12L_18_71078086
MASHKKTESNQIIKTFSFKIKNANGLSLDVLNDAITEYQNYYNICSDWIKDHLTMKIGELYKYIPDEKKNSGYALTLIS
DEWKDKPMYMMFKKGYPANNRDNAIYEALNTCNTEHYTGNILNFSDTYYRRFGYVASTISNYVTKISKMSTGSRSKNIS
NDSDVDTIMEQVIYEMEHNGWTSVKDWENQMEYLESKTDSNPNFVYRMTTLYEFYKSHIDEVNSKMETMSIDSLIKFGG
CRRKDSKKSMYIMGGSNTPFDITQIGGNSLNIKFSKNLNVDVFGRYDVIKDNTLLVDIINGHGASFVLKIINGEIYIDI
NVSVPFDKKIATTNKVVGVDVNIKHMLLATNILDDGNVNGYVNIYKEVINDSDFKKVCNSTVMKYFTDFSKFVTFCPLE
FDFLFSRVCNQKGIYNDNSAMEKSFSDVLNKLKWNFIETGDNTKRIYIENVMKLRSQMKAYAIVKNAYYKQQSEYDFGK
SEEFIQEHPFSNTDKGIEILNKLDNISKKILGCRNNIIQYSYNLFEINGYDMISLEKLTSSQFKKKPFPTVNSLLKYHK
ILGCTQEEMEKKDIYSVIKKGYYDIIFDNGVVTDAKLSTKGELSKFKDDFFNLMIKSIHFADIKDYFITLSNNGTAGVS
LVPSYFTSQMDSIDHKIYFVQDNKSGKLKLANKHKVRSSQEKHINGLNADYNAARNIAYIMENTECRNMFMKQSRTDKS
LYNKPSYETFIKTQGSAVAKLKKEGFVKILDEASV* (SEQ ID NO: 193)
>Cas12L_22_71456687
MASHKKTESNQIIKTFSFKIKNANGLSLDVLNDAITEYQNYYNICSDWIKDHLTMKIGELYKYIPDEKKNSGYALTLIS
DEWKDKPMYMMFKKGYPANSRDNAIYEALNTCNTEHYTGNILNFSDTYYRRFGYVASAISNYVTKISKMSTGSRSKNIS
NDSDVDTIMEQVIYEMEHNGWTSVKDWENQMEYLESKTDSNPNFVYRMTTLYEFYKSHIDEVNSKMETMSIDSLIKFGG
CRRKDSKKSMYIMGGSNTPFDITQIGGNSLNIKFSKNLNVDVFGRYDVIKDNTLLVDIINEHGASFVLKIINDEIYIDI
NVSVPFDKKIATTNKVVGVDVNIKHMLLATNILDDGNVNGYVNIYKEVINDSDFKKVCNSTVMKYFTDFSKFVTFCPLE
FDFLFSRVCNQKGIYNDNSAMEKSFSDVLNKLKWNFIETGDNTKRIYIENVMKLRSQMKAYAIVKNAYYKQQSEYDFGK
SEEFIQEHPFSNTDKGIEILNKLDNISKKILGCRNNIIQYSYNLFEINGYDMISLEKLTSSQFEKKPFPTVNSLLKYHK
ILGCTQEEMEKKDIYSVIKKGYYDIIFDNDVVTDAKLSTKGELSKFKDDFFNLMIKSIHFADIKDYFITLSNNGTAGVS
LVPSYFTSQMDSIDHKIYFVQDNKSGKLKLANKHKVRSSQEKHINGLNADYNAARNIAYIMENTECRNMFMKQSRTDKS
LYNKPSYETFIKTQGSAVAKLKKEGFVKILDEASV* (SEQ ID NO: 194)
>Cas12L_23_71708971
DVDTIMEQVIYEMEHNGWTSVKDWENQMEYLESKTDSNPNFVYRMTTLYEFYKSHIDEVNSKMETMSIDSLIKFGGCRR
KDSKKSMYIMGGSNTPFDITQIGGNSLNIKFSKNLNVDVFGRYDVIKDNTLLVDIINEHGASFVLKIINDEIYIDINVS
VPFDKKIATTNKVVGVDVNIKHMLLATNILDDGNVNGYVNIYKEVINDSDFKKVCNSTVMKYFTDFSKFVTFCPLEFDF
LFSRVCNQKGIYNDNSAMEKSFSDVLNKLKWNFIETGDNTKRIYIENVMKLRSQMKAYAIVKNAYYKQQSEYDFGKSEE
FIQEHPFSNTDKGIEILNKLDNISKKILGCRNNIIQYSYNLFEINGYDMISLEKLTSSQFKKKPFPTVDSLLKYHKILG
CTQEEMEKKDIYSVIKKGYYDIIFDNDVVTDAKLSTKGELSKFKDDFFNLMIKSIHFADIKDYFITLSNNGTAGVSLVP
SYFTSQMDSIDHKIYFVQDNKSGKLKLANKHKVRSSQEKHINGLNADYNAARNIAYIMENTDCRNMFMKQSRTDKSLYN
KPSYETFIKTQGSAVAKLKKEGFVKILDEASV* (SEQ ID NO: 195)
Cas14a sequences
>Cas14a.1|rifcsphigho2_02_scaffold_2167_curated|30296..31798|revcom
MEVQKTVMKTLSLRILRPLYSQEIEKEIKEEKERRKQAGGTGELDGGFYKKLEKKHSEMF
SFDRLNLLLNQLQREIAKVYNHAISELYIATIAQGNKSNKHYISSIVYNRAYGYFYNAYI
ALGICSKVEANFRSNELLTQQSALPTAKSDNFPIVLHKQKGAEGEDGGFRISTEGSDLIF
EIPIPFYEYNGENRKEPYKWVKKGGQKPVLKLILSTERRQRNKGWAKDEGTDAEIRKVTE
GKYQVSQIEINRGKKLGEHQKWFANFSIEQPIYERKPNRSIVGGLDVGIRSPLVCAINNS
FSRYSVDSNDVFKFSKQVFAFRRRLLSKNSLKRKGHGAAHKLEPITEMTEKNDKERKKII
ERWAKEVTNFFVKNQVGIVQIEDLSTMKDREDHFFNQYLRGFWPYYQMQTLIENKLKEYG
IEVKRVQAKYTSQLCSNPNCRYWNNYENFEYRKVNKFPKFKCEKCNLEISADYNAARNLS
TPDIEKFVAKATKGINLPEK (SEQ ID NO: 196)
>Cas14a.2|gwa2_scaffold_18027_curated|7105..8628
MEEAKTVSKTLSLRILRPLYSAEIEKEIKEEKERRKQGGKSGELDSGFYKKLEKKHTQMF
GWDKLNLMLSQLQRQIARVFNQSISELYIETVIQGKKSNKHYTSKIVYNRAYSVFYNAYL
ALGITSKVEANFRSTELLMQKSSLPTAKSDNFPILLHKQKGVEGEEGGFKISADGNDLIF
EIPIPFYEYDSANKKEPFKWIKKGGQKPTIKLILSTFRRQRNKGWAKDEGTDAEIRKVIE
GKYQVSHIEINRGKKLGDHQKWFVNFTIEQPIYERKLDKNIIGGIDVGIKSPLVCAVNNS
FARYSVDSNDVLKFSKQAFAFRRRLLSKNSLKRSGHGSKNKLDPITRMTEKNDRFRKKII
ERWAKEVTNFFIKNQVGTVQIEDLSTMKDRQDNFFNQYLRGFWPYYQMQNLIENKLKEYG
IETKRIKARYTSQLCSNPSCRHWNSYFSFDHRKTNNFPKFKCEKCALEISADYNAARNIS
TPDIEKFVAKATKGINLPDKNENVILE. (SEQ ID NO: 197)
>Cas14a.3|gwa1_scaffold_1795_curated|25635..27224|revcom
MAKNTITKTLKLRIVRPYNSAEVEKIVADEKNNREKIALEKNKDKVKEACSKHLKVAAYC
TTQVERNACLFCKARKLDDKFYQKLRGQFPDAVFWQEISEIFRQLQKQAAEIYNQSLIEL
YYEIFIKGKGIANASSVEHYLSDVCYTRAAELFKNAAIASGLRSKIKSNFRLKELKNMKS
GLPTTKSDNFPIPLVKQKGGQYTGFEISNHNSDFIIKIPFGRWQVKKEIDKYRPWEKFDF
EQVQKSPKPISLLLSTQRRKRNKGWSKDEGTEAEIKKVMNGDYQTSYIEVKRGSKIGEKS
AWMLNLSIDVPKIDKGVDPSIIGGIDVGVKSPLVCAINNAFSRYSISDNDLFHFNKKMFA
RRRILLKKNRHKRAGHGAKNKLKPITILTEKSERFRKKLIERWACEIADFFIKNKVGTVQ
MENLESMKRKEDSYFNIRLRGFWPYAEMQNKIEFKLKQYGIEIRKVAPNNTSKTCSKCGH
LNNYFNFEYRKKNKFPHFKCEKCNFKENADYNAALNISNPKLKSTKEEP (SEQ ID NO: 198)
>Cas14a.4|CG10_big_fil_rev_8_21_14_0.10_scaffold_20906 curated|649..2829
MERQKVPQIRKIVRVVPLRILRPKYSDVIENALKKFKEKGDDTNTNDFWRAIRDRDTEFF
RKELNFSEDEINQLERDTLFRVGLDNRVLFSYFDFLQEKLMKDYNKIISKLFINRQSKSS
FENDLTDEEVEELIEKDVTPFYGAYIGKGIKSVIKSNLGGKFIKSVKIDRETKKVTKLTA
INIGLMGLPVAKSDTFPIKIIKTNPDYITFQKSTKENLQKIEDYETGIEYGDLLVQITIP
WFKNENKDFSLIKTKEAIEYYKLNGVGKKDLLNINLVLTTYHIRKKKSWQIDGSSQSLVR
EMANGELEEKWKSFFDTFIKKYGDEGKSALVKRRVNKKSRAKGEKGRELNLDERIKRLYD
SIKAKSFPSEINLIPENYKWKLHFSIEIPPMVNDIDSNLYGGIDFGEQNIATLCVKNIEK
DDYDFLTIYGNDLLKHAQASYARRRIMRVQDEYKARGHGKSRKTKAQEDYSERMQKLRQK
ITERLVKQISDFFLWRNKFHMAVCSLRYEDLNTLYKGESVKAKRMRQFINKQQLENGIER
KLKDYNSEIYVNSRYPHYTSRLCSKCGKLNLYFDFLKFRTKNIIIRKNPDGSEIKYMPFF
ICEFCGWKQAGDKNASANIADKDYQDKLNKEKEFCNIRKPKSKKEDIGEENEEERDYSRR
FNRNSFIYNSLKKDNKLNQEKLFDEWKNQLKRKIDGRNKFEPKEYKDRFSYLFAYYQEII
KNESES (SEQ ID NO: 199)
>Cas14a.5|rifcsplowo2_01_scaffold_34461 curated|4968. 6521
MVPTELITKTLQLRVIRPLYFEEIEKELAELKEQKEKEFEETNSLLLESKKIDAKSLKKL
KRKARSSAAVEFWKIAKEKYPDILTKPEMEFIFSEMQKMMARFYNKSMTNIFIEMNNDEK
VNPLSLISKASTEANQVIKCSSISSGLNRKIAGSINKTKFKQVRDGLISLPTARTETFPI
SFYKSTANKDEIPISKINLPSEEEADLTITLPFPFFEIKKEKKGQKAYSYFNIIEKSGRS
NNKIDLLLSTHRRQRRKGWKEEGGTSAEIRRLMEGEFDKEWEIYLGEAEKSEKAKNDLIK
NMTRGKLSKDIKEQLEDIQVKYFSDNNVESWNDLSKEQKQELSKLRKKKVEELKDWKHVK
EILKTRAKIGWVELKRGKRQRDRNKWFVNITITRPPFINKELDDTKFGGIDLGVKVPFVC
AVHGSPARLIIKENEILQFNKMVSARNRQITKDSEQRKGRGKKNKFIKKEIFNERNELER
KKIIERWANQIVKFFEDQKCATVQIENLESFDRTSYK (SEQ ID NO: 200)
>Cas14a.6|3300012359.a|Ga0137385_10000156|41289..42734
MKSDTKDKKIIIHQTKTLSLRIVKPQSIPMEEFTDLVRYHQMIIFPVYNNGAIDLYKKLF
KAKIQKGNEARAIKYFMNKIVYAPIANTVKNSYIALGYSTKMQSSFSGKRLWDLRFGEAT
PPTIKADFPLPFYNQSGFKVSSENGEFIIGIPFGQYTKKTVSDIEKKTSFAWDKFTLEDT
TKKTLIELLLSTKTRKMNEGWKNNEGTEAEIKRVMDGTYQVTSLEILQRDDSWFVNENIA
YDSLKKQPDRDKIAGIHMGITRPLTAVIYNNKYRALSIYPNTVMHLTQKQLARIKEQRTN
SKYATGGHGRNAKVTGTDTLSEAYRQRRKKIIEDWIASIVKFAINNEIGTIYLEDISNTN
SFFAAREQKLIYLEDISNTNSFLSTYKYPISAISDTLQHKLEEKAIQVIRKKAYYVNQIC
SLCGHYNKGFTYQFRRKNKFPKMKCQGCLEATSTEFNAAANVANPDYEKLLIKHGLLQLK
K (SEQ ID NO: 201)
Cas14b sequences
>Cas14b.10|CG08_land_8_20_14_0.20_scaffold_1609 curated|6134..7975
MISLKLKLLPDEEQKKLLDEMFWKWASICTRVGFGRADKEDLKPPKDAEGVWFSLTQLNQ
ANTDINDLREAMKHQKHRLEYEKNRLEAQRDDTQDALKNPDRREISTKRKDLFRPKASVE
KGFLKLKYHQERYWVRRLKEINKLIERKTKTLIKIEKGRIKFKATRITLHQGSFKIRFGD
KPAFLIKALSGKNQIDAPFVVVPEQPICGSVVNSKKYLDEITTNFLAYSVNAMLEGLSRS
EEMLLKAKRPEKIKKKEEKLAKKQSAFENKKKELQKLLGRELTQQEEAIIEETRNQFFQD
FEVKITKQYSELLSKIANELKQKNDFLKVNKYPILLRKPLKKAKSKKINNLSPSEWKYYL
QFGVKPLLKQKSRRKSRNVLGIDRGLKHLLAVTVLEPDKKTFVWNKLYPNPITGWKWRRR
KLLRSLKRLKRRIKSQKHETIHENQTRKKLKSLQGRIDDLLHNISRKIVETAKEYDAVIV
VEDLQSMRQHGRSKGNRLKTLNYALSLFDYANVMQLIKYKAGIEGIQIYDVKPAGTSQNC
AYCLLAQRDSHEYKRSQENSKIGVCLNPNCQNHKKQIDADLNAARVIASCYALKINDSQP
FGTRKRFKKRTTN (SEQ ID NO: 202)
>Cas14b.11|CG_4_10_14_0.8_um_filter_scaffold_20762_curated|1372..3219
METLSLKLKLNPSKEQLLVLDKMFWKWASICTRLGLKKAEMSDLEPPKDAEGVWFSKTQL
NQANTDVNDLRKAMQHQGKRIEYELDKVENRRNEIQEMLEKPDRRDISPNRKDLFRPKAA
VEKGYLKLKYHKLGYWSKELKTANKLIERKRKTLAKIDAGKMKFKPTRISLHTNSFRIKF
GEEPKIALSTTSKHEKIELPLITSLQRPLKTSCAKKSKTYLDAAILNFLAYSTNAALFGL
SRSEEMLLKAKKPEKIEKRDRKLATKRESFDKKLKTLEKLLERKLSEKEKSVFKRKQTEF
FDKFCITLDETYVEALHRIAEELVSKNKYLEIKKYPVLLRKPESRLRSKKLKNLKPEDWT
YYIQFGFQPLLDTPKPIKTKTVLGIDRGVRHLLAVSIFDPRTKTFTFNRLYSNPIVDWKW
RRRKLLRSIKRLKRRLKSEKHVHLHENQFKAKLRSLEGRIEDHFHNLSKEIVDLAKENNS
VIVVENLGGMRQHGRGRGKWLKALNYALSHFDYAKVMQLIKYKAELAGVFVYDVAPAGTS
INCAYCLLNDKDASNYTRGKVINGKKNTKIGECKTCKKEFDADLNAARVIALCYEKRLND
PQPFGTRKQFKPKKP. (SEQ ID NO: 203)
>Cas14b.12|CG22 combo CG10-
13_8_21_14_all_scaffold_2003_curated|553..2880|revcom
MKALKLQLIPTRKQYKILDEMFWKWASLANRVSQKGESKETLAPKKDIQKIQFNATQLNQ
IEKDIKDLRGAMKEQQKQKERLLLQIQERRSTISEMLNDDNNKERDPHRPLNFRPKGWRK
FHTSKHWVGELSKILRQEDRVKKTIERIVAGKISFKPKRIGIWSSNYKINFFKRKISINP
LNSKGFELTLMTEPTQDLIGKNGGKSVLNNKRYLDDSIKSLLMFALHSRFFGLNNTDTYL
LGGKINPSLVKYYKKNQDMGEFGREIVEKFERKLKQEINEQQKKIIMSQIKEQYSNRDSA
FNKDYLGLINEFSEVENQRKSERAEYLLDSFEDKIKQIKQEIGESLNISDWDFLIDEAKK
AYGYEEGFTEYVYSKRYLEILNKIVKAVLITDIYFDLRKYPILLRKPLDKIKKISNLKPD
EWSYYIQFGYDSINPVQLMSTDKFLGIDRGLTHLLAYSVFDKEKKEFIINQLEPNPIMGW
KWKLRKVKRSLQHLERRIRAQKMVKLPENQMKKKLKSIEPKIEVHYHNISRKIVNLAKDY
NASIVVESLEGGGLKQHGRKKNARNRSLNYALSLFDYGKIASLIKYKADLEGVPMYEVLP
AYTSQQCAKCVLEKGSFVDPEIIGYVEDIGIKGSLLDSLFEGTELSSIQVLKKIKNKIEL
SARDNHNKEINLILKYNFKGLVIVRGQDKEEIAEHPIKEINGKFAILDFVYKRGKEKVGK
KGNQKVRYTGNKKVGYCSKHGQVDADLNASRVIALCKYLDINDPILFGEQRKSFK. (SEQ ID NO: 204)
>Cas14b.13|rifcsphigho2_01_scaffold_82367_curated|1523..3856|revcom
MVTRAIKLKLDPTKNQYKLLNEMFWKWASLANRFSQKGASKETLAPKDGTQKIQFNATQL
NQIKKDVDDLRGAMEKQGKQKERLLIQIQERLLTISEILRDDSKKEKDPHRPQNFRPFGW
RRFHTSAYWSSEASKLTRQVDRVRRTIERIKAGKINFKPKRIGLWSSTYKINFLKKKINI
SPLKSKSFELDLITEPQQKIIGKEGGKSVANSKKYLDDSIKSLLIFAIKSRLFGLNNKDK
PLFENIITPNLVRYHKKGQEQENFKKEVIKKFENKLKKEISQKQKEIIFSQIERQYENRD
ATFSEDYLRAISEFSEIFNQRKKERAKELLNSFNEKIRQLKKEVNGNISEEDLKILEVEA
EKAYNYENGFIEWEYSEQFLGVLEKIARAVLISDNYFDLKKYPILIRKPTNKSKKITNLK
PEEWDYYIQFGYGLINSPMKIETKNFMGIDRGLTHLLAYSIFDRDSEKFTINQLELNPIK
GWKWKLRKVKRSLQHLERRMRAQKGVKLPENQMKKRLKSIEPKIESYYHNLSRKIVNLAK
ANNASIVVESLEGGGLKQHGRKKNSRHRALNYALSLFDYGKIASLIKYKSDLEGVPMYEV
LPAYTSQQCAKCVLKKGSFVEPEIIGYIEEIGFKENLLTLLFEDTGLSSVQVLKKSKNKM
TLSARDKEGKMVDLVLKYNFKGLVISQEKKKEEIVEFPIKEIDGKFAVLDSAYKRGKERI
SKKGNQKLVYTGNKKVGYCSVHGQVDADLNASRVIALCKYLGINEPIVFGEQRKSFK (SEQ ID NO: 205)
>Cas14b.14|gwc1_scaffold_8732_curated|2705..4537
LDLITEPIQPHKSSSLRSKEFLEYQISDFLNFSLHSLFFGLASNEGPLVDFKIYDKIVIP
KPEERFPKKESEEGKKLDSFDKRVEEYYSDKLEKKIERKLNTEEKNVIDREKTRIWGEVN
KLEEIRSIIDEINEIKKQKHISEKSKLLGEKWKKVNNIQETLLSQEYVSLISNLSDELTN
KKKELLAKKYSKFDDKIKKIKEDYGLEFDENTIKKEGEKAFLNPDKFSKYQFSSSYLKLI
GEIARSLITYKGFLDLNKYPIIFRKPINKVKKIHNLEPDEWKYYIQFGYEQINNPKLETE
NILGIDRGLTHILAYSVFEPRSSKFILNKLEPNPIEGWKWKLRKLRRSIQNLERRWRAQD
NVKLPENQMKKNLRSIEDKVENLYHNLSRKIVDLAKEKNACIVFEKLEGQGMKQHGRKKS
DRLRGLNYKLSLFDYGKIAKLIKYKAEIEGIPIYRIDSAYTSQNCAKCVLESRRFAQPEE
ISCLDDFKEGDNLDKRILEGTGLVEAKIYKKLLKEKKEDFEIEEDIAMFDTKKVIKENKE
KTVILDYVYTRRKEIIGTNHKKNIKGIAKYTGNTKIGYCMKHGQVDADLNASRTIALCKN
FDINNPEIWK. (SEQ ID NO: 206)
>Cas14b.15|3300010293.a|Ga0116204_1008574|2134..4032
MSDESLVSSEDKLAIKIKIVPNAEQAKMLDEMFKKWSSICNRISRGKEDIETLRPDEGKE
LQFNSTQLNSATMDVSDLKKAMARQGERLEAEVSKLRGRYETIDASLRDPSRRHTNPQKP
SSFYPSDWDISGRLTPRFHTARHYSTELRKLKAKEDKMLKTINKIKNGKIVFKPKRITLW
PSSVNMAFKGSRLLLKPFANGFEMELPIVISPQKTADGKSQKASAEYMRNALLGLAGYSI
NQLLFGMNRSQKMLANAKKPEKVEKFLEQMKNKDANFDKKIKALEGKWLLDRKLKESEKS
SIAVVRTKFFKSGKVELNEDYLKLLKHMANEILERDGFVNLNKYPILSRKPMKRYKQKNI
DNLKPNMWKYYIQFGYEPIFERKASGKPKNIMGIDRGLTHLLAVAVFSPDQQKFLENHLE
SNPIMHWKWKLRKIRRSIQHMERRIRAEKNKHIHEAQLKKRLGSIEEKTEQHYHIVSSKI
INWAIEYEAAIVLESLSHMKQRGGKKSVRTRALNYALSLFDYEKVARLITYKARIRGIPV
YDVLPGMTSKTCATCLLNGSQGAYVRGLETTKAAGKATKRKNMKIGKCMVCNSSENSMID
ADLNAARVIAICKYKNLNDPQPAGSRKVFKRF. (SEQ ID NO: 207)
>Cas14b.16|3300005573.a|Ga0078972_1001015a|33750..35627
MLALKLKIMPTEKQAEILDAMFWKWASICSRIAKMKKKVSVKENKKELSKKIPSNSDIWF
SKTQLCQAEVDVGDHKKALKNFEKRQESLLDELKYKVKAINEVINDESKREIDPNNPSKF
RIKDSTKKGNLNSPKFFTLKKWQKILQENEKRIKKKESTIEKLKRGNIFFNPTKISLHEE
EYSINFGSSKLLLNCFYKYNKKSGINSDQLENKENEFQNGLNIICSPLQPIRGSSKRSFE
FIRNSIINFLMYSLYAKLFGIPRSVKALMKSNKDENKLKLEEKLKKKKSSFNKTVKEFEK
MIGRKLSDNESKILNDESKKFFEIIKSNNKYIPSEEYLKLLKDISEEIYNSNIDFKPYKY
SILIRKPLSKFKSKKLYNLKPTDYKYYLQLSYEPFSKQLIATKTILGIDRGLKHLLAVSV
FDPSQNKFVYNKLIKNPVFKWKKRYHDLKRSIRNRERRIRALTGVHIHENQLIKKLKSMK
NKINVLYHNVSKNIVDLAKKYESTIVLERLENLKQHGRSKGKRYKKLNYVLSNFDYKKIE
SLISYKAKKEGVPVSNINPKYTSKTCAKCLLEVNQLSELKNEYNRDSKNSKIGICNIHGQ
IDADLNAARVIALCYSKNLNEPHFK. (SEQ ID NO: 208)
>Cas14b.1|rifcsplowo2_01_scaffold_239_curated|54653..56257
LKLSEQENITTGVKFKLKLDKETSEGLNDYFDEYGKAINFAIKVIQKELAEDRFAGKVRL
DENKKPLLNEDGKKIWDFPNEFCSCGKQVNRYVNGKSLCQECYKNKFTEYGIRKRMYSAK
GRKAEQDINIKNSTNKISKTHENYAIREAFILDKSIKKQRKERFRRLREMKKKLQEFIEI
RDGNKILCPKIEKQRVERYIHPSWINKEKKLEDFRGYSMSNVLGKIKILDRNIKREEKSL
KEKGQINFKARRLMLDKSVKFLNDNKISFTISKNLPKEYELDLPEKEKRLNWLKEKIKII
KNQKPKYAYLLRKDDNFYLQYTLETEFNLKEDYSGIVGIDRGVSHIAVYTFVHNNGKNER
PLFLNSSEILRLKNLQKERDRFLRRKHNKKRKKSNMRNIEKKIQLILHNYSKQIVDFAKN
KNAFIVFEKLEKPKKNRSKMSKKSQYKLSQFTFKKLSDLVDYKAKREGIKVLYISPEYTS
KECSHCGEKVNTQRPFNGNSSLFKCNKCGVELNADYNASINIAKKGLNILNSTN. (SEQ ID NO: 209)
>Cas14b.2|rifcsplowo2_01_scaffold_282_curated|77370..78983
MEESIITGVKFKLRIDKETTKKLNEYFDEYGKAINFAVKIIQKELADDRFAGKAKLDQNK
NPILDENGKKIYEFPDEFCSCGKQVNKYVNNKPFCQECYKIRFTENGIRKRMYSAKGRKA
EHKINILNSTNKISKTHFNYAIREAFILDKSIKKQRKKRNERLRESKKRLQQFIDMRDGK
REICPTIKGQKVDRFIHPSWITKDKKLEDFRGYTLSIINSKIKILDRNIKREEKSLKEKG
QIIFKAKRLMLDKSIRFVGDRKVLFTISKTLPKEYELDLPSKEKRLNWLKEKIEIIKNQK
PKYAYLLRKNIESEKKPNYEYYLQYTLEIKPELKDFYDGAIGIDRGINHIAVCTFISNDG
KVTPPKFFSSGEILRLKNLQKERDRFLLRKHNKNRKKGNMRVIENKINLILHRYSKQIVD
MAKKLNASIVFEELGRIGKSRTKMKKSQRYKLSLFIFKKLSDLVDYKSRREGIRVTYVPP
EYTSKECSHCGEKVNTQRPFNGNYSLFKCNKCGIQLNSDYNASINIAKKGLKIPNST (SEQ ID NO: 210)
>Cas14b.3|rifcsphigho2_01_scaffold_36781_curated|2592..4217
LWTIVIGDFIEMPKQDLVTTGIKFKLDVDKETRKKLDDYFDEYGKAINFAVKIIQKNLKE
DRFAGKIALGEDKKPLLDKDGKKIYNYPNESCSCGNQVRRYVNAKPFCVDCYKLKFTENG
IRKRMYSARGRKADSDINIKNSTNKISKTHENYAIREGFILDKSLKKQRSKRIKKLLELK
RKLQEFIDIRQGQMVLCPKIKNQRVDKFIHPSWLKRDKKLEEFRGYSLSVVEGKIKIFNR
NILREEDSLRQRGHVNFKANRIMLDKSVRFLDGGKVNFNLNKGLPKEYLLDLPKKENKLS
WLNEKISLIKLQKPKYAYLLRREGSFFIQYTIENVPKTFSDYLGAIGIDRGISHIAVCTF
VSKNGVNKAPVFFSSGEILKLKSLQKQRDLFLRGKHNKIRKKSNMRNIDNKINLILHKYS
RNIVNLAKSEKAFIVFEKLEKIKKSRFKMSKSLQYKLSQFTFKKLSDLVEYKAKIEGIKV
DYVPPEYTSKECSHCGEKVDTQRPFNGNSSLFKCNKCRVQLNADYNASINIAKKSLNISN
N. (SEQ ID NO: 211)
>Cas14b.4|cg1_0.2_scaffold_785_c_curated|32521..34155
MSKTTISVKLKIIDLSSEKKEFLDNYFNEYAKATTFCQLRIRRLLRNTHWLGKKEKSSKK
WIFESGICDLCGENKELVNEDRNSGEPAKICKRCYNGRYGNQMIRKLFVSTKKREVQENM
DIRRVAKLNNTHYHRIPEEAFDMIKAADTAEKRRKKNVEYDKKRQMEFIEMENDEKKRAA
RPKKPNERETRYVHISKLESPSKGYTLNGIKRKIDGMGKKIERAEKGLSRKKIFGYQGNR
IKLDSNWVRFDLAESEITIPSLFKEMKLRITGPTNVHSKSGQIYFAEWFERINKQPNNYC
YLIRKTSSNGKYEYYLQYTYEAEVEANKEYAGCLGVDIGCSKLAAAVYYDSKNKKAQKPI
EIFTNPIKKIKMRREKLIKLLSRVKVRHRRRKLMQLSKTEPIIDYTCHKTARKIVEMANT
AKAFISMENLETGIKQKQQARETKKQKFYRNMFLFRKLSKLIEYKALLKGIKIVYVKPDY
TSQTCSSCGADKEKTERPSQAIFRCLNPTCRYYQRDINADFNAAVNIAKKALNNTEVVTT
LL. (SEQ ID NO: 212)
>Cas14b.5|rifcsphigho2_02_scaffold_55589_curated|1904..3598
MARAKNQPYQKLTTTTGIKFKLDLSEEEGKRFDEYFSEYAKAVNFCAKVIYQLRKNLKFA
GKKELAAKEWKFEISNCDFCNKQKEIYYKNIANGQKVCKGCHRTNFSDNAIRKKMIPVKG
RKVESKFNIHNTTKKISGTHRHWAFEDAADIIESMDKQRKEKQKRLRREKRKLSYFFELF
GDPAKRYELPKVGKQRVPRYLHKIIDKDSLTKKRGYSLSYIKNKIKISERNIERDEKSLR
KASPIAFGARKIKMSKLDPKRAFDLENNVFKIPGKVIKGQYKFFGTNVANEHGKKFYKDR
ISKILAGKPKYFYLLRKKVAESDGNPIFEYYVQWSIDTETPAITSYDNILGIDAGITNLA
TTVLIPKNLSAEHCSHCGNNHVKPIFTKFFSGKELKAIKIKSRKQKYFLRGKHNKLVKIK
RIRPIEQKVDGYCHVVSKQIVEMAKERNSCIALEKLEKPKKSKFRQRRREKYAVSMFVFK
KLATFIKYKAAREGIEIIPVEPEGTSYTCSHCKNAQNNQRPYFKPNSKKSWTSMFKCGKC
GIELNSDYNAAFNIAQKALNMTSA. (SEQ ID NO: 213)
>Cas14b.6|CG03_land_8_20_14_0.80_scaffold_2214_curated|6634..8466|revcom
MDEKHFFCSYCNKELKISKNLINKISKGSIREDEAVSKAISIHNKKEHSLILGIKFKLFI
ENKLDKKKLNEYFDNYSKAVTFAARIFDKIRSPYKFIGLKDKNTKKWTFPKAKCVFCLEE
KEVAYANEKDNSKICTECYLKEFGENGIRKKIYSTRGRKVEPKYNIFNSTKELSSTHYNY
AIRDAFQLLDALKKQRQKKLKSIFNQKLRLKEFEDIFSDPQKRIELSLKPHQREKRYIHL
SKSGQESINRGYTLRFVRGKIKSLTRNIEREEKSLRKKTPIHFKGNRLMIFPAGIKFDFA
SNKVKISISKNLPNEFNFSGTNVKNEHGKSFFKSRIELIKTQKPKYAYVLRKIKREYSKL
RNYEIEKIRLENPNADLCDFYLQYTIETESRNNEEINGIIGIDRGITNLACLVLLKKGDK
KPSGVKFYKGNKILGMKIAYRKHLYLLKGKRNKLRKQRQIRAIEPKINLILHQISKDIVK
IAKEKNFAIALEQLEKPKKARFAQRKKEKYKLALFTFKNLSTLIEYKSKREGIPVIYVPP
EKTSQMCSHCAINGDEHVDTQRPYKKPNAQKPSYSLFKCNKCGIELNADYNAAFNIAQKG
LKTLMLNHSH. (SEQ ID NO: 214)
>Cas14b.7|3300013125.a|Ga0172369_10000737|994..2652|revcom
MDEEPDSAEPNLAPISVKLKLVKLDGEKLAALNDYFNEYAKAVNFCELKMQKIRKNLVNI
RGTYLKEKKAWINQTGECCICKKIDELRCEDKNPDINGKICKKCYNGRYGNQMIRKLFVS
TNKRAVPKSLDIRKVARLHNTHYHRIPPEAADIIKAIETAERKRRNRILFDERRYNELKD
ALENEEKRVARPKKPKEREVRYVPISKKDTPSKGYTMNALVRKVSGMAKKIERAKRNLNK
RKKIEYLGRRILLDKNWVRFDFDKSEISIPTMKEFFGEMRFEITGPSNVMSPNGREYFTK
WFDRIKAQPDNYCYLLRKESEDETDFYLQYTWRPDAHPKKDYTGCLGIDIGGSKLASAVY
FDADKNRAKQPIQIFSNPIGKWKTKRQKVIKVLSKAAVRHKTKKLESLRNIEPRIDVHCH
RIARKIVGMALAANAFISMENLEGGIREKQKAKETKKQKFSRNMFVERKLSKLIEYKALM
EGVKVVYIVPDYTSQLCSSCGTNNTKRPKQAIFMCQNTECRYFGKNINADFNAAINIAKK
ALNRKDIVRELS. (SEQ ID NO: 215)
>Cas14b.8|3300013125.a|Ga0172369_10010464|885..2489|revcom
MEKNNSEQTSITTGIKFKLKLDKETKEKLNNYFDEYGKAINFAVRIIQMQLNDDRLAGKY
KRDEKGKPILGEDGKKILEIPNDFCSCGNQVNHYVNGVSFCQECYKKRFSENGIRKRMYS
AKGRKAEQDINIKNSTNKISKTHENYAIREAFNLDKSIKKQREKRFKKLKDMKRKLQEFL
EIRDGKRVICPKIEKQKVERYIHPSWINKEKKLEEFRGYSLSIVNSKIKSFDRNIQREEK
SLKEKGQINFKAQRLMLDKSVKFLKDNKVSFTISKELPKTFELDLPKKEKKLNWLNEKLE
IIKNQKPKYAYLLRKENNIFLQYTLDSIPEIHSEYSGAVGIDRGVSHIAVYTFLDKDGKN
ERPFFLSSSGILRLKNLQKERDKFLRKKHNKIRKKGNMRNIEQKINLILHEYSKQIVNFA
KDKNAFIVFELLEKPKKSRERMSKKIQYKLSQFTFKKLSDLVDYKAKREGIKVIYVEPAY
TSKDCSHCGERVNTQRPFNGNFSLFKCNKCGIVINSDYNASLNIARKGLNISAN. (SEQ ID NO: 216)
>Cas14b.9|3300013127.a|Ga0172365_10004421|633..2366|revcom
MAEEKFFFCEKCNKDIKIPKNYINKQGAEEKARAKHEHRVHALILGIKFKIYPKKEDISK
LNDYFDEYAKAVTFTAKIVDKLKAPFLFAGKRDKDTSKKKWVFPVDKCSFCKEKTEINYR
TKQGKNICNSCYLTEFGEQGLLEKIYATKGRKVSSSFNLFNSTKKLTGTHNNYVVKESLQ
LLDALKKQRSKRLKKLSNTRRKLKQFEEMFEKEDKRFQLPLKEKQRELRFIHVSQKDRAT
EFKGYTMNKIKSKIKVLRRNIEREQRSLNRKSPVFFRGTRIRLSPSVQFDDKDNKIKLTL
SKELPKEYSFSGLNVANEHGRKFFAEKLKLIKENKSKYAYLLRRQVNKNNKKPIYDYYLQ
YTVEFLPNIITNYNGILGIDRGINTLACIVLLENKKEKPSFVKFFSGKGILNLKNKRRKQ
LYFLKGVHNKYRKQQKIRPIEPRIDQILHDISKQIIDLAKEKRVAISLEQLEKPQKPKFR
QSRKAKYKLSQFNFKTLSNYIDYKAKKEGIRVIYIAPEMTSQNCSRCAMKNDLHVNTQRP
YKNTSSLFKCNKCGVELNADYNAAFNIAQKGLKILNS. (SEQ ID NO: 217)
Cas14c Sequences
>Cas14c.1|CG10_big_fil_rev_8_21_14_0.10_scaffold_4477_curated|19327..20880|revcom
VINLFGYKFALYPNKTQEELLNKHLGECGWLYNKAIEQNEYYKADSNIEEAQKKFELLPD
KNSDEAKVLRGNISKDNYVYRTLVKKKKSEINVQIRKAVVLRPAETIRNLAKVKKKGLSV
GRLKFIPIREWDVLPFKQSDQIRLEENYLILEPYGRLKFKMHRPLLGKPKTFCIKRTATD
RWTISFSTEYDDSNMRKNDGGQVGIDVGLKTHLRLSNENPDEDPRYPNPKIWKRYDRRLT
ILQRRISKSKKLGKNRTRLRLRLSRLWEKIRNSRADLIQNETYEILSENKLIAIEDLNVK
GMQEKKDKKGRKGRTRAQEKGLHRSISDAAFSEFRRVLEYKAKRFGSEVKPVSAIDSSKE
CHNCGNKKGMPLESRIYECPKCGLKIDRDLNSAKVILARATGVRPGSNARADTKISATAG
ASVQTEGTVSEDFRQQMETSDQKPMQGEGSKEPPMNPEHKSSGRGSKHVNIGCKNKVGLY
NEDENSRSTEKQIMDENRSTTEDMVEIGALHSPVLTT. (SEQ ID NO: 218)
>Cas14c.2|3300001245.a|JGI12048J13642_10201286|4257..5489|revcom
MIASIDYEAVSQALIVFEFKAKGKDSQYQAIDEAIRSYRFIRNSCLRYWMDNKKVGKYDL
NKYCKVLAKQYPFANKLNSQARQSAAECSWSAISRFYDNCKRKVSGKKGFPKFKKHARSV
EYKTSGWKLSENRKAITFTDKNGIGKLKLKGTYDLHFSQLEDMKRVRLVRRADGYYVQFC
ISVDVKVETEPTGKAIGLDVGIKYFLADSSGNTIENPQFYRKAEKKLNRANRRKSKKYIR
GVKPQSKNYHKARCRYARKHLRVSRQRKEYCKRVAYCVIHSNDVVAYEDLNVKGMVKNRH
LAKSISDVAWSTFRHWLEYFAIKYGKLTIPVAPHNTSQNCSNCDKKVPKSLSTRTHICHH
CGYSEDRDVNAAKNILKKALSTVGQTGSLKLGEIEPLLVLEQSCTRKFDL (SEQ ID NO: 219)
Cas14d sequences
>Cas14d.1|RIFCSPHIGHO2_01_FULL_CPR_46_36_rifcsphigho2_01_scaffold_646_curated|
49808..51616|revcom
MSQSLLKWHDMAGRDKDASRSLQKSAVEGVLLHLTASHRVALEMLEKSVSQTVAVTMEAA
QQRLVIVLEDDPTKATSRKRVISADLQFTREEFGSLPNWAQKLASTCPEIATKYADKHIN
SIRIAWGVAKESTNGDAVEQKLQWQIRLLDVTMFLQQLVLQLADKALLEQIPSSIRGGIG
QEVAQQVTSHIQLLDSGTVLKAELPTISDRNSELARKQWEDAIQTVCTYALPESRERARI
LDPGKYAAEDPRGDRLINIDPMWARVLKGPTVKSLPLLFVSGSSIRIVKLTLPRKHAAGH
KHTFTATYLVLPVSREWINSLPGTVQEKVQWWKKPDVLATQELLVGKGALKKSANTLVIP
ISAGKKRFFNHILPALQRGFPLQWQRIVGRSYRRPATHRKWFAQLTIGYTNPSSLPEMAL
GIHFGMKDILWWALADKQGNILKDGSIPGNSILDFSLQEKGKIERQQKAGKNVAGKKYGK
SLLNATYRVVNGVLEFSKGISAEHASQPIGLGLETIRFVDKASGSSPVNARHSNWNYGQL
SGIFANKAGPAGFSVTEITLKKAQRDLSDAEQARVLAIEATKRFASRIKRLATKRKDDTL
FV. (SEQ ID NO: 220)
>Cas14d.2|rifcsphigho2_01_scaffold_10981_curated|5762..7246|revcom
VEPVEKERFYYRTYTFRLDGQPRTQNLTTQSGWGLLTKAVLDNTKHYWEIVHHARIANQP
IVFENPVIDEQGNPKLNKLGQPRFWKRPISDIVNQLRALFENQNPYQLGSSLIQGTYWDV
AENLASWYALNKEYLAGTATWGEPSFPEPHPLTEINQWMPLTFSSGKVVRLLKNASGRYF
IGLPILGENNPCYRMRTIEKLIPCDGKGRVTSGSLILFPLVGIYAQQHRRMTDICESIRT
EKGKLAWAQVSIDYVREVDKRRRMRRTRKSQGWIQGPWQEVFILRLVLAHKAPKLYKPRC
FAGISLGPKTLASCVILDQDERVVEKQQWSGSELLSLIHQGEERLRSLREQSKPTWNAAY
RKQLKSLINTQVFTIVTFLRERGAAVRLESIARVRKSTPAPPVNFLLSHWAYRQITERLK
DLAIRNGMPLTHSNGSYGVRFTCSQCGATNQGIKDPTKYKVDIESETFLCSICSHREIAA
VNTATNLAKQLLDE. (SEQ ID NO: 221)
>Cas14d.3|RIFCSPLOWO2_01_FULL_OD1_45_34b_rifcsplowo2_01_scaffold_3495_curated|
25656..27605|revcom
MNDTETSETLTSHRTVCAHLHVVGETGSLPRLVEAALAELITLNGRATQALLSLAKNGLV
LRRDKEENLIAAELTLPCRKNKYADVAAKAGEPILATRINNKGKLVTKKWYGEGNSYHIV
RFTPETGMFTVRVFDRYAFDEELLHLHSEVVFGSDLPKGIKAKTDSLPANFLQAVFTSFL
ELPFQGFPDIVVKPAMKQAAEQLLSYVQLEAGENQQAEYPDTNERDPELRLVEWQKSLHE
LSVRTEPFEFVRARDIDYYAETDRRGNRFVNITPEWTKFAESPFARRLPLKIPPEFCILL
RRKTEGHAKIPNRIYLGLQIFDGVTPDSTLGVLATAEDGKLFWWHDHLDEFSNLEGKPEP
KLKNKPQLLMVSLEYDREQRFEESVGGDRKICLVTLKETRNFRRGRHGHTRTDRLPAGNT
LWRADFATSAEVAAPKWNGRILGIHFQHNPVITWALMDHDAEVLEKGFIEGNAFLGKALD
KQALNEYLQKGGKWVGDRSFGNKLKGITHTLASLIVRLAREKDAWIALEEISWVQKQSAD
SVANRRFSMWNYSRLATLIEWLGTDIATRDCGTAAPLAHKVSDYLTHFTCPECGACRKAG
QKKEIADTVRAGDILTCRKCGFSGPIPDNFIAEFVAKKALERMLKKKPV. (SEQ ID NO: 222)
Cas14e sequences
>Cas14e.1|rifcsphigho2_01_scaffold_566_curated|113069..114313
MAKRNFGEKSEALYRAVRFEVRPSKEELSILLAVSEVLRMLFNSALAERQQVFTEFIASL
YAELKSASVPEEISEIRKKLREAYKEHSISLFDQINALTARRVEDEAFASVTRNWQEETL
DALDGAYKSFLSLRRKGDYDAHSPRSRDSGFFQKIPGRSGFKIGEGRIALSCGAGRKLSF
PIPDYQQGRLAETTKLKKFELYRDQPNLAKSGRFWISVVYELPKPEATTCQSEQVAFVAL
GASSIGVVSQRGEEVIALWRSDKHWVPKIEAVEERMKRRVKGSRGWLRLLNSGKRRMHMI
SSRQHVQDEREIVDYLVRNHGSHFVVTELVVRSKEGKLADSSKPERGGSLGLNWAAQNTG
SLSRLVRQLEEKVKEHGGSVRKHKLTLTEAPPARGAENKLWMARKLRESFLKEV. (SEQ ID NO: 223)
>Cas14e.2|rifcsplowo2_01_scaffold_81231_curated|976..2217
LAKNDEKELLYQSVKFEIYPDESKIRVLTRVSNILVLVWNSALGERRARFELYIAPLYEE
LKKFPRKSAESNALRQKIREGYKEHIPTFFDQLKKLLTPMRKEDPALLGSVPRAYQEETL
NTLNGSFVSFMTLRRNNDMDAKPPKGRAEDRFHEISGRSGFKIDGSEFVLSTKEQKLRFP
IPNYQLEKLKEAKQIKKFTLYQSRDRRFWISIAYEIELPDQRPENPEEVIYIAFGASSIG
VISPEGEKVIDFWRPDKHWKPKIKEVENRMRSCKKGSRAWKKRAAARRKMYAMTQRQQKL
NHREIVASLLRLGFHFVVTEYTVRSKPGKLADGSNPKRGGAPQGENWSAQNTGSFGEFIL
WLKQKVKEQGGTVQTFRLVLGQSERPEKRGRDNKIEMVRLLREKYLESQTIVV. (SEQ ID NO: 224)
>Cas14e.3|rifcsphigho2_01_scaffold_4702_curated|82881..84230|revcom
MAKGKKKEGKPLYRAVRFEIFPTSDQITLFLRVSKNLQQVWNEAWQERQSCYEQFFGSIY
ERIGQAKKRAQEAGFSEVWENEAKKGLNKKLRQQEISMQLVSEKESLLQELSIAFQEHGV
TLYDQINGLTARRIIGEFALIPRNWQEETLDSLDGSFKSFLALRKNGDPDAKPPRQRVSE
NSFYKIPGRSGFKVSNGQIYLSFGKIGQTLTSVIPEFQLKRLETAIKLKKFELCRDERDM
AKPGREWISVAYEIPKPEKVPVVSKQITYLAIGASRLGVVSPKGEFCLNLPRSDYHWKPQ
INALQERLEGVVKGSRKWKKRMAACTRMFAKLGHQQKQHGQYEVVKKLLRHGVHFVVTEL
KVRSKPGALADASKSDRKGSPTGPNWSAQNTGNIARLIQKLTDKASEHGGTVIKRNPPLL
SLEERQLPDAQRKIFIAKKLREEFLADQK. (SEQ ID NO: 225)
Cas14f sequences
>Cas14f.1|rifcsp13_1_sub10_scaffold_3_curated|38906..41041
MAKREKKDDVVLRGTKMRIYPTDRQVTLMDMWRRRCISLWNLLLNLETAAYGAKNTRSKL
GWRSIWARVVEENHAKALIVYQHGKCKKDGSFVLKRDGTVKHPPRERFPGDRKILLGLED
ALRHTLDKGAKCKCNVNQPYALTRAWLDETGHGARTADIIAWLKDFKGECDCTAISTAAK
YCPAPPTAELLTKIKRAAPADDLPVDQAILLDLFGALRGGLKQKECDHTHARTVAYFEKH
ELAGRAEDILAWLIAHGGTCDCKIVEEAANHCPGPRLFIWEHELAMIMARLKAEPRTEWI
GDLPSHAAQTVVKDLVKALQTMLKERAKAAAGDESARKTGFPKFKKQAYAAGSVYFPNTT
MFFDVAAGRVQLPNGCGSMRCEIPRQLVAELLERNLKPGLVIGAQLGLLGGRIWRQGDRW
YLSCQWERPQPTLLPKTGRTAGVKIAASIVFTTYDNRGQTKEYPMPPADKKLTAVHLVAG
KQNSRALEAQKEKEKKLKARKERLRLGKLEKGHDPNALKPLKRPRVRRSKLFYKSAARLA
ACEAIERDRRDGFLHRVTNEIVHKFDAVSVQKMSVAPMMRRQKQKEKQIESKKNEAKKED
NGAAKKPRNLKPVRKLLRHVAMARGRQFLEYKYNDLRGPGSVLIADRLEPEVQECSRCGT
KNPQMKDGRRLLRCIGVLPDGTDCDAVLPRNRNAARNAEKRLRKHREAHNA. (SEQ ID NO: 226)
>Cas14f.2|3300009991.a|Ga0105042_100140|1624..3348
MNEVLPIPAVGEDAADTIMRGSKMRIYPSVRQAATMDLWRRRCIQLWNLLLELEQAAYSG
ENRRTQIGWRSIWATVVEDSHAEAVRVAREGKKRKDGTFRKAPSGKEIPPLDPAMLAKIQ
RQMNGAVDVDPKTGEVTPAQPRLFMWEHELQKIMARLKQAPRTHWIDDLPSHAAQSVVKD
LIKALQAMLRERKKRASGIGGRDTGFPKFKKNRYAAGSVYFANTQLRFEAKRGKAGDPDA
VRGEFARVKLPNGVGWMECRMPRHINAAHAYAQATLMGGRIWRQGENWYLSCQWKMPKPA
PLPRAGRTAAIKIAAAIPITTVDNRGQTREYAMPPIDRERIAAHAAAGRAQSRALEARKR
RAKKREAYAKKRHAKKLERGIAAKPPGRARIKLSPGFYAAAAKLAKLEAEDANAREAWLH
EITTQIVRNFDVIAVPRMEVAKLMKKPEPPEEKEEQVKAPWQGKRRSLKAARVMMRRTAM
ALIQTTLKYKAVDLRGPQAYEEIAPLDVTAAACSGCGVLKPEWKMARAKGREIMRCQEPL
PGGKTCNTVLTYTRNSARVIGRELAVRLAERQKA (SEQ ID NO: 227)
Cas14g sequences
>Cas14g.1|RBG_13_scaffold_1401_curated|15949..18180
MSVRSFQARVECDKQTMEHLWRTHKVENERLPEIIKILFKMKRGECGQNDKQKSLYKSIS
QSILEANAQNADYLLNSVSIKGWKPGTAKKYRNASFTWADDAAKLSSQGIHVYDKKQVLG
DLPGMMSQMVCRQSVEAISGHIELTKKWEKEHNEWLKEKEKWESEDEHKKYLDLREKFEQ
FEQSIGGKITKRRGRWHLYLKWLSDNPDFAAWRGNKAVINPLSEKAQIRINKAKPNKKNS
VERDEFFKANPEMKALDNLHGYYERNFVRRRKTKKNPDGFDHKPTFTLPHPTIHPRWFVF
NKPKTNPEGYRKLILPKKAGDLGSLEMRLLTGEKNKGNYPDDWISVKFKADPRLSLIRPV
KGRRVVRKGKEQGQTKETDSYEFFDKHLKKWRPAKLSGVKLIFPDKTPKAAYLYFTCDIP
DEPLTETAKKIQWLETGDVTKKGKKRKKKVLPHGLVSCAVDLSMRRGTTGFATLCRYENG
KIHILRSRNLWVGYKEGKGCHPYRWTEGPDLGHIAKHKREIRILRSKRGKPVKGEESHID
LQKHIDYMGEDRFKKAARTIVNFALNTENAASKNGFYPRADVLLLENLEGLIPDAEKERG
INRALAGWNRRHLVERVIEMAKDAGFKRRVFEIPPYGTSQVCSKCGALGRRYSIIRENNR
REIRFGYVEKLFACPNCGYCANADHNASVNLNRRFLIEDSFKSYYDWKRLSEKKQKEEIE
TIESKLMDKLCAMHKISRGSISK. (SEQ ID NO: 228)
>Cas14g.2|3300009652.a|Ga0123330_1010394|2814..5123
MHLWRTHCVFNQRLPALLKRLFAMRRGEVGGNEAQRQVYQRVAQFVLARDAKDSVDLLNA
VSLRKRSANSAFKKKATISCNGQAREVTGEEVFAEAVALASKGVFAYDKDDMRAGLPDSL
FQPLTRDAVACMRSHEELVATWKKEYREWRDRKSEWEAEPEHALYLNLRPKFEEGEAARG
GRFRKRAERDHAYLDWLEANPQLAAWRRKAPPAVVPIDEAGKRRIARAKAWKQASVRAEE
FWKRNPELHALHKIHVQYLREFVRPRRTRRNKRREGFKQRPTFTMPDPVRHPRWCLFNAP
QTSPQGYRLLRLPQSRRTVGSVELRLLTGPSDGAGFPDAWVNVRFKADPRLAQLRPVKVP
RTVTRGKNKGAKVEADGFRYYDDQLLIERDAQVSGVKLLERDIRMAPFADKPIEDRLLSA
TPYLVFAVEIKDEARTERAKAIRFDETSELTKSGKKRKTLPAGLVSVAVDLDTRGVGELT
RAVIGVPEIQQTHHGVRLLQSRYVAVGQVEARASGEAEWSPGPDLAHIARHKREIRRLRQ
LRGKPVKGERSHVRLQAHIDRMGEDRFKKAARKIVNEALRGSNPAAGDPYTRADVLLYES
LETLLPDAERERGINRALLRWNRAKLIEHLKRMCDDAGIRHFPVSPFGTSQVCSKCGALG
RRYSLARENGRAVIRFGWVERLFACPNPECPGRRPDRPDRPFTCNSDHNASVNLHRVFAL
GDQAVAAFRALAPRDSPARTLAVKRVEDTLRPQLMRVHKLADAGVDSPF (SEQ ID NO: 229)
Cas14h sequences
>Cas14h.1|3300005602.a|Ga0070762_10001740|7377..9071|revcom
MSRVELHRAYKFRLYPTPAQVAELAEWERQLRRLYNLAHSQRLAAMQRHVRPKSPGVLKS
ECLSCGAVAVAEIGTDGKAKKTVKHAVGCSVLECRSCGGSPDAEGRTAHTAACSFVDYYR
QGREMTQLLEEDDQLARVVCSARQETLRDLEKAWQRWHKMPGFGKPHFKKRIDSCRIYES
TPKSWAVDLGYLSFTGVASSVGRIKIRQDRVWPGDAKFSSCHVVRDVDEWYAVFPLTFTK
EIEKPKGGAVGINRGAVHAIADSTGRVVDSPKFYARSLGVIRHRARLLDRKVPFGRAVKP
SPTKYHGLPKADIDAAAARVNASPGRLVYEARARGSIAAAEAHLAALVLPAPRQTSQLPS
EGRNRERARRFLALAHQRVRRQREWFLHNESAHYAQSYTKIAIEDWSTKEMTSSEPRDAE
EMKRVTRARNRSILDVGWYELGRQIAYKSEATGAEFAKVDPGLRETETHVPEAIVRERDV
DVSGMLRGEAGISGTCSRCGGLLRASASGHADAECEVCLHVEVGDVNAAVNVLKRAMFPG
AAPPSKEKAKVTIGIKGRKKKRAA. (SEQ ID NO: 230)
>Cas14h.2|3300005921.a|Ga0070766_10011912|384..2081
MSRVELHRAYKFRLYPTPVQVAELSEWERQLRRLYNLGHEQRLLTLTRHLRPKSPGVLKG
ECLSCDSTQVQEVGADGRPKTTVRHAEQCPTLACRSCGALRDAEGRTAHTVACAFVDYYR
QGREMTELLAADDQLARVVCSARQEVLRDLDKAWQRWRKMPGFGKPRFKRRTDSCRIYFS
TPKAWKLEGGHLSFTGAATTVGAIKMRQDRNWPASVQFSSCHVVRDVDEWYAVFPLTFVA
EVARPKGGAVGINRGAVHAIADSTGRVVDSPRYYARALGVIRHRARLFDRKVPSGHAVKP
SPTKYRGLSAIEVDRVARATGFTPGRVVTEALNRGGVAYAECALAAIAVLGHGPERPLTS
DGRNREKARKFLALAHQRVRRQREWFLHNESAHYARTYSKIAIEDWSTKEMTASEPQGEE
TRRVTRSRNRSILDVGWYELGRQLAYKTEATGAEFAQVDPGLKETETNVPKAIADARDVD
VSGMLRGEAGISGTCSKCGGLLRAPASGHADAECEICLNVEVGDVNAAVNVLKRAMFPGD
APPASGEKPKVSIGIKGRQKKKKAA. (SEQ ID NO: 231)
>Cas14h.3|3300009698.a|Ga0116216_10000905|8005..9504
MEAIATGMSPERRVELGILPGSVELKRAYKFRLYPMKVQQAELSEWERQLRRLYNLAHEQ
RLAALLRYRDWDFQKGACPSCRVAVPGVHTAACDHVDYFRQAREMTQLLEVDAQLSRVIC
CARQEVLRDLDKAWQRWRKKLGGRPRFKRRTDSCRIYLSTPKHWEIAGRYLRLSGLASSV
GEIRIEQDRAFPEGALLSSCSIVRDVDEWYACLPLTFTQPIERAPHRSVGLNRGVVHALA
DSDGRVVDSPKFFERALATVQKRSRDLARKVSGSRNAHKARIKLAKAHQRVRRQRAAFLH
QESAYYSKGFDLVALEDMSVRKMTATAGEAPEMGRGAQRDLNRGILDVGWYELARQIDYK
RLAHGGELLRVDPGQTTPLACVTEEQPARGISSACAVCGIPLARPASGNARMRCTACGSS
QVGDVNAAENVLTRALSSAPSGPKSPKASIKIKGRQKRLGTPANRAGEASGGDPPVRGPV
EGGTLAYVVEPVSESQSDT. (SEQ ID NO: 232)
Cas14i sequences
>Ga0066868_100162752
MTRNYPYKFRLEPTEEQKTRLKHYGFTCRFIYNLALDQRNLSRDPKPLPTLLEMWEKRVADKLAGVKPERKER
NFEEERKQEVVHKNINYGFQSPQMTVLRREVEWMQDVPFSCLQETLRSLQTAFKNFFDRVKKGQRVSDGR
NPYGYPVYRSRYRLSIPFKPANVSIKKVSERAGGEEGAYFSELKVPLMGSLIRFRQDRPVLGTPKTPTLKLEGDG
KWYVVILTEQEVEDPQTPEAEVGIDLGVAKMITLSDGTIYPLTKKQQQTFTNIDTTEKRIRKLQAACDRRKTKF
SKNWIKVKRQVVKLKHRQKRSRESLHHEITHLITSGFGRVAVENLNIKGMTPSASGTEEEPGTNVAQKSGLN
REILKRGWGLLVSQLEYKAKWRGGEVIKVDPKYTSQTCSKCGHVEKANRATQATFLCQKCGHKENADVNAA
KNILTRAEKQ*. (SEQ ID NO: 233)
>PhageCas14_SR-VP_2-4_scaffold_141_2548329_92
MAKQAPGKRTDESKERKAFSFRLYPTPEQERYLARVVGSCRYIYNALVREHERRMKYMRTFGAWPKPIGFKT
SKKKQSLAEDYKLEASLYEIQTALHEPGGPAPWLEDVAGNIRNHAVAMFGAAQTNWMSGRTGPPNFKQRR
PAGSFRFQDTRVASITGGPDRQPGFDFIRIPLPHGIEIDSWICFRRHRRLRGQPKTATIRRAAGIWYVSILCEW
DKPAKLPVHRAPNAKVGVDLNVRNLCALSDGTIIDGRSADLARLEKSINRLKHRESKLRLREKAASAPRSKRHF
RLQCRIARLQDRQANLRNEVTNQVAHAVALKHAFVGLEGLDIKGMTASAKGTVDAPGLNVRAKAGLNRAIL
NRGWGKLREKIESKVKIYGGQTVRVPPQYTSQTCAKCGHIAAENRDGVIFHCVKCGFTAHADVNAATNILEK
ALRLSAQESPGSGSLDGERPTELGSTTRQRVRKQKDTKTLGAPKATSRKGATAPRSTIPSLHVDMQVTSARVV
PAPQEALATEIAQQMKALAKSEVDAAPRQKINRRRRSQTEVEVPTGSVE* (SEQ ID NO: 234)
>PhageCas14_SR-VP_4-6_scaffold_141_3640689_5
MAKQAPGKRTDESKERKAFSFRLYPTPEQERYLARVVGSCRYIYNALVREHERRMKYMRTFGAWPKPIGFKT
SKKKQSLAEDYKLEASLYEIQTALHEPGGPAPWLEDVAGNIRNHAVALFGAAQTNWMSGRTGPPNFKQRR
PAGSFRFQDTRVASITGGPDRQPGFDFIRIPLPHGIEIDSWICFRRHRRLRGQPKTATIRRAAGIWYVSILCEW
DKPAKLPVHRAPNAKVGVDLNVRYLCALSDGTIIDGRSADLARLEKSINRLKHRESKLRLREKAASAPRSKRHF
RLQCRIARLQDRQANLRNEVTNQVAHAVALKHAFVGLEGLDIKGMTASAKGTVDAPGLNVRAKAGLNRAIL
NRGWGKLREKIESKVKIYGGQTVRVPPQYTSQTCAKCGHIAAENRDGVIFHCVKCGFTAHADVNAATNILEK
ALRLSAQESPGSGSLDGERPTELGSTTRQRVRKQKDTKTLGAPKATSRKGATAPRSTIRSLHVDMQVTSARVV
PAPQEALATEIAQQMKALAKSEVDAAPRQKINRRRRSQTEVEVPTGSVE* (SEQ ID NO: 235)
Cas14J sequences
>PhageCas14J_k87_9374247_16
MIESKAFKFRVYPTDKQKELIHNSVRASNFIFNFSLRQQIDISDKMNEMGIIEKGERKKYMKDNDLYFNKYTM
SRQLTVMGNTEEFSFLKEIDATSKSYALRRIDNAFKNMVKMGAGFPKFKNINKSTYSFTGQIQYQNDRIKNLR
VIKTKNPKIVHLNLSKLKNLKCVCHIPMFIENWSNMDTIKINSYTISRKGNNYYISFQVEHNQPLISEPIKREIKYE
TTIGIDMGVERPITTSDEADFNLKLFNERFNILKKHRKELHKLSAILNKKRDYHKKNESEIKFYETATYKRILKKM
RGLYHKITNIRENLQHNITSNLVNKENIDTFILEELNLKNMTKRSGKGKSNNKSNLNRVLLDVGMHGIKSKLEY
KAEKMGKNVETINPRFTSQKCSDCGHINKLNRKSQAVFKCVKCGYTLNADLNAAINIKNNFFGKNT* (SEQ ID
NO: 236)
>PhageCas14J_LacPavin_0818_WC40_scaffold_407201_205
MEDIIEISEKKKKTKISGTGKGFSIRIYPDKKQIEYIRDSFRVNNFIYNYFLSKQEKIVSELKEMGLEGKALKSHMK
LNNLYFDYNSSRDLLYEMKKTPEYSFLGNASALSYHYALMRLKNAFDNMWKMNTGFPNYRKRHINKSFSGQ
ILFNTKADKYSPFEIQTINDKWCEITLTKITELKCVVHNNELLDFWNDRSYMHLKSYTITETPSGEFYLAITADIIS
KPMLEKRIVNEETSIGIDMGVARPITTSDEELFNDKQLSDKFNLIKEYKSEVERLSQILAKKREGNKNWKESKKY
ERIKKRLAKLHSKIANIRKYLQHNITSKLINSKYDTIIIEDLDVKNMMKKSAKGKSNNKRGLNRVLSDTGLGEIKR
QLVYKSNWCGKNIVTVDPKYTSQMCSNCGHTHRDNRKKQDEFICVSCGHNENADLNAAKNIKNKFFKKLAE
LKN* (SEQ ID NO: 237)
>PhageCas14J_BML_08042016_6_5m_scaffold_18_prodigal-single_54
MITKAYKFRIYPTKVQEETINNCFRVNDFIYNFFLGLEQETYDVLYMYGLRNGEKKEDKHLNKWRTENKLWF
NRFDASRLLTKMAKLEKYKFLKTYPSTSRTYSLKSLESGMKSFMKGGGFPKFKNKKSNKSFTIQTQKDLKIIHKN
GKWHSINLPSALDFPIKKLDIKIHNELFLSPNIKTNSCTVSKRGNQYFISFQVELPGELPRKREIKKETSVGVDFG
VKKIITISSDEENPYSCETRFLKNSMNELKRLQKALSQKKKGSVKYNNIKEKINKLHIKISNQRKNLQHNISSFLV
NLNADTIIMEDLNLKGMTKTPNPIESNGTFLPNGKSRKSGLNASILDVGIGEIKTQVQYKSDFCGKNVVLVNP
QYTSQKCNNCGFTHKENRISQSEFECKNCGHKDNADKNASKNIKQKYFDN* (SEQ ID NO: 238)
>Ga0194119_1000113823
VKQNKAYKYRIYPTEKQIEYFEGAFKAGRYVYNVSLDCEKQIYQLGGKSNLSHFGLNYHIKNYRVKAPFLNEYD
VNIYCNEMKALSKAYKNFFKNKGGYPKFKKESDTTQSFTTRPSTKQNSKNLYITYDGYLKIPKVEKLIKIKYHRPI
EGKIKTVTISKKHNKYYVSIMVEYTNNFKKVEVKKSVGIDLGVKAFVVTSDNEVIENPKHLTKNQEHLTVLQRK
LARAKKGSNNYKKIKKNISKIHENVANTRENFLHNESKKLVDNYDLICMEDLNVKGMTKSSKGTKENPGKNV
KQKSGLNRSIIDVGFGKFKTMIGYKTKNSGKYLVEIGRFEPTSKKCNCCGTINKNLELKDRIWKCENCGEILNRD
LNAALNIRDLGTKKFFDSLKK (SEQ ID NO: 239)
>Ga0116197_10005458
MLKAYKYRIYPTKEQITLIEKHFGSTRFLYNYFLEYRQKAYAKGNQKVGYMVTQAELTKLKKLKEYEWLNECGS
QSLQMALRDLDSAYSRFFKKQGGYPKFKSKKHTSQSFTAPQNIKLASNRVYLPKFTKDGIKVKLHREIPQDAVL
KQATVSRQNNQYFVSILIDDNNAIPKPIKAKNAVGLDMGLTDLIITSDFTKYPNNKYFVKSQQKLKKLQRRHSK
KQKGSNNRQKAKLRVQKLHTKVSNQRKDTLHKISNEITNQYDIICLETLNVRGMQKNRRLAKGIADVAWSEF
MRQLAYKAQWKGKTVLKIDQWFPSSQICSNCGASSKKKELHVRKWECPECHAKHDRDINASINIKNYGLGQ
IDNRNTVGTIGI* (SEQ ID NO: 240)
>Ga0116179_10426881
MKIINKTYRFRLFPTKEQEVLLNKHFGCCRWVYNHFLNERKEQYQANKKSDNYYKQAATLAKLKNEEDTKWL
KEVNSQSLQFALRSLDTAFLNFFRGKAQFPKFKSKKHKNTFTIPQFGKLEDGKIVIPKFKEGIKVKLHREVKGKI
GKMSITKTPTGKYYVSIFTEQEVEELPKTNKQVGIDLGLKDFVITSDNKKFKNNRYVKKYEKQLKKAQQHLSRK
QKGSKGFEKQKLKVAKIHEKIANCRLDILHKVSTELVKNYDLIAVEDLNVKGMTKNHKLSKHIADASWGKFVT
LLQYKCDWYGKKLVKVNRFYPSSKTCSECGWINQELKLSDREWTCNSCGAIHDRDLNASKNILKEGLKIISAG
AVDYTDGDLNDASVKKRKSVKSEAQPIAFGVGG* (SEQ ID NO: 241)
>Ga0268285_10062095
MIKAFKYRIYPTQDQKELLSNIFGQVRFVYNLGLETKISAYTGNKKHLSCFDLNKQITQLKNECPWLKESPSQA
LQQSIRNLDVAYTNFFRGAGFPKFKNKYTKQSFQLPQGVFLSDDKKQIFIPKLKFTDIDLHKEFKGEVKTVTVSK
TTTNKYYISILVDDKKPIPEKRQIKLESTVGIDLGIKDFAITSDGKKFKNHDFFKSAMNELRIQQRSLARKQKGSN
HYIKQKMKVSLLHEHIKNQREDYLHKISKYLVYNYDTICIENLGVSNMMKNHKLSRVIGDMGWHKFKSMLEY
KCEWYGKNLSVIGRFDPSSKTCSSCGSINKELTLNDREWTCKCGTKHDRDINAAINIRNFGLRNQPSVTQSE
WLHCACDVETHQSLADV (SEQ ID NO: 242)
Cas14K sequences
>PhageCas14_RifSed
MTTQKTYNFCFYDQRFFELSKEAGEVYSRSLEEFWKIYDETGVWLSKFDLQKHMRNKLERKLLHSDSFLGAM
QQVHANLASWKQAKKVVPDACPPRKPKFLQAILFKKSQIKYKNGFLRLTLGTEKEFLYLKWDINIPLPIYGSVT
YSKTRGWKINLCLETEVEQKNLSENKYLSIDLGVKRVATIFDGENTITLSGKKFMGLMHYRNKLNGKTQSRLS
HKKKGSNNYKKIQRAKRKTTDRLLNIQKEMLHKYSSFIVNYAIRNDIGNIIIGDNSSTHDSPNMRGKTNQKISQ
NPEQKLKNYIKYKFESISGRVDIVPEPYTSRKCPHCKNIKKSSPKGRTYKCKKCGFIFDRDGVGAINIYNENVSFG
QIISPGRIRSLTEPIGMKFHNEIYFKSYVAA (SEQ ID NO: 243)
>PhageCas14_16ft_4_scaffold_2_465_16ft_4_Phage_29_13
VITKKTYNFSLYDPRFFELAKEAGDVYSRSLEEFWKVYDETGVWLSKFDLQKHMRNKLERKLLHSDSFIGAMQ
QVHANLASWKQAKKVVKDACPPRKPKFLQAILFKKSQIKYKNGFLKLTLGIGNEYLNLKWNQEIPLPIYGSVTY
SKTRGWKINLCLETDVEQKNLDNNKFLSIDLGVKRIATIFDGENTITLSGKKFMGLMHYRNKLNGKTQSRLSH
KKKGSNNYKKIQRAKRRTTDKILNIQKDMLHKYSSFVVNYAIKNNIGNIIIGDNSSTHDSPNMRGKTNQKISQ
NPEQKLKNYIKYKFEGISGQVNIVPEPYTSRKCPCCKNIKKSSPRGRTYKCKKCDFVEDRDGVGAINIYNENVSF
GTCLNLDSGRIRFLTEPIGMKFHNEVYFKSYVAVA* (SEQ ID NO: 244)
>Ga0116179_10109322
LKELYKTYILPVKQQELARKLSRESGRIYSKVVSKVFDIYKRKGFWLNEFDMKKYIRLYAKNIGLHSQTKQGIVE
QYYIALDSFFKAYKNHRNPKPPYKRRKYNVVMYKDSAIKLKNGILKLSNGKGNEPLMVKANKLGKKPKYAELV
YHHNKRKYFLHITVEMKGVQRVYEKDRAIAVDLGQIHPMVTYDSKRSIIFNGGVLNSFIRFRNKQLSKLQQK
MSMCKKYSKRWKKLNGAKKKLLNKSKNKVNDVLQKYTSYLVGYCIEQGIGTIVIGDIKSIRENINYGVKTNQKL
HNSWLFRKMTNIIEHKANNVGIKVEYINEAYTSQTCPVCNKKHKPGNRNFTCKCGFKYHRDAVGAINIHKKY
TSSLSARLEGDLTPPVGYRYRYNQRCLAGWNTSIFDAGYFSDLPTKKVA* (SEQ ID NO: 245)
>Ga0116179_10465782
MSRYVVRTYKVAVPKELYPLCAELNKTAARIYNKTMSLVKKIKYKKGFWLSPNNTQKYILRWACSINVHTHSK
QAIIQQYFQALDSYFNAVKTKPDLNPPYKRKRFMPFIWKDTAIKLLPDGKLKLSMGSNREPIVIQTTLLADTKIR
QAKLVYEEGKYYLHLVIEGKNVARKPQNGKIMAVDLGILRPITCFDGTEVISYHGGILNSLIRYRNKELAKFQQ
MLSRCKKGSKRYRKLVKAKKKMLRRTRHQIKDILHKITSNFLKMCLQKGIGTIALGDVTNIRERVEGNDSANQ
KLHQWCFRKMVDMITYKAELLGMDVKLVPEEYTSQTCPMCGSRNHSNNRNYKCQNCGFKYHRDGVGAIN
IYVRYLGKKSQVVAGLAPVRGVRYKPHLCGHGVRNAPWKAA* (SEQ ID NO: 246)
>Ga0134101_10165752
MPGYVVRTYKVPVPEELYPLCAELNKTAARIYNKTMSLVKKIKRKKGIWLSSNNAQKYILRWACGINVHTHSK
QAMVQQYFQALDSYFNAVKAKPDLRPPYKKKRFMPFIWKDAAIKLLPDGKLRLSMGNNQKPVVIQTTLPAD
TKIRQAKLVYEDGKYYLHLATEVKNEVQKQQGKKVMAVDLGILRPITCFDGIEVISYHGGILNSLIRYRNKELAK
FQQMLSRCKKGSKRYRKLVKAKKKMLRRIRHQIKDILHKITSNFLKMCLQKGIKTIAVGDITNIRERVQGNDN
ANQKLHQWCFRKMIDMLTYKVHPLGIDVKLVPENYTSQTCPACGSRNHPTDRNYECQNCGFKYHRDGVG
AINIYARYLGKKSQVVAGLAPVRGVRYKPHLCGHGV (SEQ ID NO: 247)
>Ga0066665_100815632
MYQVRRVNIGKTAQLDELARECGRLYSQTLASFWRTVRHKGIWLKPKHLMRWHTSEKLHAHTADACVQAF
FASLKSWRERRKLGDPDAHPPRKRKWYFRIEYKSTAMHHKDSVLTLSNGKGNTPLVLEWPWETPKTVVIHW
TGTQYEAIATYKIEAQGQPQGNKVAGIDLGEIHMAVSHDGTETHILNGRLLRSKRQYQNKLKAELSTMIDVK
KKGSLRRKKLIRSKQKQLKKLQHQVNDIEHKQSSRLISTLHAKGVQTVVIGDVRDIRQDLDVGSKNNQKLHQ
WSHGSIRHKLTYKAEWLGMEVALQDEHYTSRTCPMCQHVRKSKVQGRVFRCPTCHWTYHRDGVGAINIR
QKYLGSLPVIGDMAPPIGMRFRPHTSVARWEKTYQ* (SEQ ID NO: 248)
>Ga0224523_10070512
MYNVRKLKIDQTEQLDVLATASGELYSRTLVSFWRTVRKHGLWLKPSSMMRWQNSGELHAHSADAVVQS
FYASLKSWRALRKVDPDAKPPKRRKHFFKVQWKNSAIRLKDGCLVLSNGKGNEPLIIPWNWTLPTLVELGW
NGTGYELRVIYSTTPTGVPLGVKVAGVDMGEIHLAVTHDGDDCHIYNGRYLRSVKRYQNKKKAEISARLDRM
KKGSRRSKYLKHNKARTLKKLDNQINDILHKQTTKLVSTLHEAGVKTVVIGDVRDIRKGLDYGAKANQKIHQW
HLGKTRWLVSYKAERLGMEVVLQDEAYTSQTCPACGKRHKPKDRNYRCSCGFQYHRDGIGAYNIRAKYLGE
LETPHVVGAMMSPTGVRVLQRCSHLARKNPLPLGMG (SEQ ID NO: 249)
>Ga0247839_10583994
MNIAHQDAIWEASKESASIYNDAIKLNQDGIPKAQAMKSLSIQSKHTKYLQSQSSQAPYQNFFIDLSSYFASLK
RYQKSKRGYKNEPKPPHKIKTLHAITFKKSAIRVQNGYLLLSLRKPNKPIKLKWSLSKPIWVLINFDIRTGWKMN
CVMEQEVQQHQLDKTKILAIDLGNKRIAASFDGKRCVTYSGKILKSLTRLQNKCSARSKASTSSLIKNSKKYKRV
MRARRKITARINNQKRDILHKTSRAIVNYAIENNIDKIVFGDCSSIHDGTTLGKENTQQVQQGCEQKLRKYVE
YKFRNVGGTTELVSERYSSQECPICDHRYEPRGRTYKCSACGYVYDRDGVGSINIYTNVSSGLTLDVVGGLMP
PRGWKFHSQLPCTTLRNSYFSMLYCGEPNDL (SEQ ID NO: 250)
Cas14u sequences
>Cas14u9|PhageCas14|LacPavin_0818_WC55_scaffold_56344_prodigal-single_16
VRKIAESKGYFTKAVSVELVGHSKEDTVWLLDILNRGYPLANKMYLLYRWYYEGLFPT
EIELNKLETYVYHKAREDSRFTDIPSNIIACTNRTILQKIKYDIKSGAKSGKRSWSQFKKG
QPLYFVQHNYLEKTDDGYNYNFIFGHKFKLKFGRHNEGEQLIEKLMDSESQFKLNANA
AFKVIKRRLFLLLSYEIPDKIENKPNPDNIMGIDFGMANFATCYLANDRKFKIVRDHKYLK
KRLLLQRKIKNLQSELSMHHAGLGRARKTRKIEDYRNKEKNLTKTEISQILSSIVRLAQA
NNIGTIKIEYLTIDQKTQLEDKYVYRNWAVMMTIDMLREKAKYVGINVVTIDPYHTSQKC
STCGTIGTRDGRIFSCENPSCKSFHKVVNADKNAAINIANSTQFVDDVKDTEYYKQKQEFFKTLREKKETNIT* (SEQ
ID NO: 251)
>Cas14u10|Ga0153798_100522201
MAKKNIDDTKKVTLCEKVKLTQIYSPVVDWKEFHKIFKILQKETILASNKIISICNIFNSENN
KEEQKDWLIKKYQSEKLRNVLYDVARKYCYYSYSRNANAISNDIYYKYFKGPNSYKVKI
QKGIGNPPMTFTESIPLYITVQRHKIECTNNVRHYYTIEVPLLSNNCKSGIQITDTEQTQV
NNNALREGINAAGNKRLIEILDNIIYGKYEFCDSKLKRVKSKKRSHRYDYYFLLSYKKPVI
EIKSLKPENVLGVDLGMTVPAYCAVNYCDYKKKAVGDSRIIRFNLIQEKINKRIQRNIKYN
LRDGHGRKYKLDGYDGASNKIAKRNSTFNFNLASEIIQLAIKWQCGTIHLEDLTKIHEINP
QNRFLKNWTYYDLQKKIENKAKEYGIVVKYINPYYTSQICSNCGHFESGQRISQSQFQC
KSCGYSANADYNAARNIALYKF* (SEQ ID NO: 252)
>Cas14u_VU_u11|rifcsplowo2_12_scaffold_23_prodigal-single_23
MSTMVFEYYLRSPEKEQEQIVIQQLRASYEYYNTLIRIEQNRRNQFRAIQSQDPKIAQLE
LEISSLDTEIDLHLTSIQNTRSTNRKNVLDKKDVDRVKSLKADRKLKRDELKIAKKSFCD
NLIFQKACEDINLFAKNESKAARKATPSYWGSYLLIENAIDAAKKSKTDPKRKYWDWTG
RLGVQVQGGMSVSELFGNDTRIQIDPVSLDAWYHPIRGKRKYAQRQPKLRFRINSDDK
GKPIFVEFPMIMHRPLPQNACIKQANVIVTNRDRKLCYVLQLTVNIPEPVASPCTNGVGI
DLGWRLMDSGDIRVAYGYDQKGTKIDLRLPKSITSLFQKAESIRAIRDKEFEDHRKIMIP
LIQGVTFPNINTTNIGLSKSFRRFHSLYLGWKANRQDGDQIAFDALETWHRKDRHLEQ
YEVGCRKRAMNYRREEYRKFAKQMTSTYGYLALENWNISKVALRPEIEDGTREQSEP
QHQRVMACVSMLRQILINTAKREGVSIISVPAAYTTLECAACHKINTWDTSKNVCQTCE
NCDTVWDQDENAARNLLASGTVLKNTAPLPEEANIANTEKKSRWSKRKAEVVIDEKVDRSQIAS*
(SEQ ID NO: 253)
>Cas14u_VU_u12|SR-VP_4-6_scaffold_141_2630357_509
MKVYKYGLLPPIKNQTLVFEQLNKAYQYKKQLIDLVNQEKALLKKEEDNIFQRLNPALIS
KKETTQQTVEELLALMKQQRSKNRSKQDNIELKQQFKIAKENAKQAKKDYFTELSRIKT
LEEVKTSKEKIKTNFKQLHKEARKKCGVYWGTYLLIEEAVEQSKKTSFKKDFIFYGRRD
NERLGNQIQTSKDDSGSKIMGMLSSHLFNEKNSQIYIEPVADTAWIGVYRKDRRRTAKT
ILHWRIASDEKLKPIWAEFPMIMHRPLPKDSKIKSATISRRFYGPHQEWTLEITIDDNLSP
TKELGNGVVALDIGWRKLNDKIRVATLYDGEFHKELVISTYQLDKANELKSLRDDLENQ
VKNQITEWNKEKFPEWILKELEFVSKWKSQARLVRLVKNWKKERWQDDNIYFELVEA
WRYKDQHLWQWECGSRRSGLRERIIIATLPPNLERNITVLYWKTLIFQRWQNYQNFRQ
KKI* (SEQ ID NO: 254)
>Cas14u_VU_u13|gwd1_scaffold_1554_3
MPVKAVKFQIIKPLNATWDVLGKTLRDLNYHTTLMCNRAIQLYWEYGNFRSQYKAEHG
KYPIDKDIYGCSYRNHVYRQLRLMYPLMASSNTSQTNQFALKRWQTDVPDIRKLAKSIP
SFKLGTPIQVANQNFDLRENDDTFSVDVTLLGRESEVGRFSILLDTGDKSKRVIFQRILD
RTYKQGSMQIVYSKKKGKWFCVIAYDSPIKVNELDIDKVMGIDLGIVNAVYWAFNSGHN
RGCISGGEIDTFRKQIEVRRRQILRTPRKDGHGRKRNMQAADILGEKISNFRDTVNHKY
SKKIIDIAIANKCGVIQMEDLTGISKDSFFLRNWTYRDLQDKIVYKALQEGIIVKLIDPRNT
SKTCSVCGHLDAENREDQATFICKNPECGSNMNADHNAAKNISVWSKVSKEFGL* (SEQ ID NO: 255)
>Cas14u_VU_u14|pig_F100_scaffold_13388_4
MNKVMRYQIIKPIDIDWKTFGDILNKLRQEVRFTKNKTIALYNDWLTYCFQYKNEHNEY
PKLVDYCGYKVFSGYAYDKFKTEVVFSNTANYTTSVREACSAYDAHKTDILKGNCSIPS
MGANQPIDLHNKSLSVDINEFGDYIATISLLSNRGKKEFGLKSGQIKIVLKAGDKSSRDIL
QRCVSKEYKICGSKIIYKDKKTFINLCYGFEPVTSELDKSKVMGIDLGVSVPAYMAFNED
KYKRDSIKDNRIMATKWMMDRQLSIAKQSCKYLSDGNCGHGRKKKMVCYDKYSNKS
RNLSQTINHGWSKYIVDVAFRNGCGTIQMEDLSGVTSEKDKFLKNWTFYDLQQKIEYK
AKERGINVVKINPKYTSQRCCECGCICKRNRPDQKTFKCISCGYSANADFNAAKNIATI
GIEDIIANTEVIE* (SEQ ID NO: 256)
>Cas14u_VU_u15|pig_ID_3640_F65_scaffold_73762_2
MRIEIMVKKKGINMNKIMKYQILKPTNIGWEDFGNILYNLRSEVRKIKNRTIALYHEWTGY
TLECHDRTGEWPKPKDVYNYGTIGGYIYDRLKGEVKYSNSVNFSSSVRDAMSKYDTH
KKDILAGKASVPSMGDGQPIDIYNKNIVLHHLDNEKKDYAATLSLLNNGAKTELGLLSG
RVDVILTIKNETQTAILDRCLSGEYRVCGSQLVYEAAGKEKKGKKDKPKVWLYLCYGFE
PEAPELDDSRIMGIDLGMKLPAVMAFNENDKKYEVIDDNRILDRKIRLDKMLSISKHQCQ
WRCDGNSGHGRKKKVDVYERYSHKSHNLSMHINHQWSKYIVDTAVKNKCGVIQMED
LSGIKASRQNFLGNWTYYDLQQKITYKAEEKGVKVIKVDPSYTSQMCPVCGYINKRNR
STOADFECLECGHIANADYNAARNIATPDIANIIKNRLAQQKKEGKPIE* (SEQ ID NO: 257)
>Cas14u_VU_u16|pig_ID_1851_F40_2_scaffold_55126_1
MPMSSYRKTHYTNTCELREIYMRIEIMVKKKGINMNKIMKYQILKPTNISWEDFGNILYN
LRSEVRKIKNRTIALYHEWTNYTLECHDKTGEWPKPKDVYNYGTMSGYIYDRLKGEVR
YSNSVNFNSSVRDAMSKYDTHKKDILAGKVSVPSMGDGQPIDIYNKNIVLHHLDNEKK
DYAATLSLLNNGAKAELGLLSGRVDVILTIKNETQTAILDRCLSGEYRICGSQLIYEGGK
EKKGKKDKPKVWLYLCYGFEPEAPELDDSRIMGIDLGMKLPAVMAFNFNDKKYEVIDD
NRILDRKIRLDKMLSMSKHQCQWRCDGNSGHGRNKKVDVYERYSHKSHNLSMDINH
QWSKYIVDTAVKNKCGVIQMEDLSGIKASRQNFLGNWTYYDLQQKITYKAEEKGIKVIK
VDPCYTSQMCPVCGYINKRNRSTQADFECLECGHIANADYNAARNIATPDIANIIKNRL
AQQKKEGKPIE*. (SEQ ID NO: 258)
>Cas14u_VU_u17|pig_ID_3784_F96_scaffold_13509_10
MNKIMKYQIIKPLNIDWETFGNILENLRKESRQVKNRAIAIYHEWVLYSMAYYDECGKW
PKIIDVYPPYKTADGYIYDKLKNEMGHMLSNNFNATIRNALSKYDTHKKDIMAGKVSVP
SMDAGQPIDVYAKGITLHHIDGDKGDYVATLSLLNSKAKATLNLPSGRIDMVLKMNDKT
QTAILDRCLSGEYRICGSQLVYEAAGKEKKGKKDKPKVWLYLCYGFEPEAPELDDSRI
MGIDLGMKLPAVMAFNENDKKYEVIDDNRILDRKIRLDKMLSISKHQCQWRCDGNSGH
GRKKKVDVYERYSHKSHNLSMDINHQWSKYIVETAVKNKCGVIQVEDLSGIKASRQNF
LGNWTYYDLQQKITYKAEEKGIKVIKVDPSYTSQMCPVCGYINKRNRSTQADFECLEC
GHIANADYNAARNIATPDIANIIKNRLAQQKKEGKPIE* (SEQ ID NO: 259)
>Cas14u_VU_u18|SRR1747065_scaffold_28
MNKVMKYQIIKPLNIDWEDFGNILENLRKESRQIKNRAIAIYHEWVQYSMSYYDEYGKW
PKVIDVYPPYKTVDGYIYDRLKNEMGHTSSNNFNATIRNALSKYDTHKKDIMAGKVSVP
SMDAGQPIDVYAKGITLHHIDGDKDDYVATLSLLNSKAKATLNLPSGRIDMVLKMNDKT
QTAILDRCLSGEYRICGSQLIYEAAGKEKKGKKDKPKVWLYLCYGFEPEAPELDDSRIM
GIDLGMKLPAVMAFNENDKKYEVIDDNRILGQKIRLDKMLSISKHQCQWRCDGNSGHG
RKKKVDVYEKCSHRSHNLSMDINHQWSKYIVETAIKNKCGVIQMEDLSGIKASRQNFL
GNWTYYDLQQKITYKAEGKGIKVIKIDPHYTSQMCPICGYINKRNRSTQADFECLECGH
IANADYNAARNIATPDIANIIKNRVKQQEKEGKSID (SEQ ID NO: 260)
>Cas14u.1|3300009029.a|Ga0066793_10010091|37..1113|revcom
MSTITRQVRLSPTPEQSRLLMAHCQQYISTVNVLVAAFDSEVLTGKVSTKDFRAALPSAV
KNQALRDAQSVFKRSVELGCLPVLKKPHCQWNNQNWRVEGDQLILPICKDGKTQQERFRC
AAVALEGKAGILRIKKKRGKWIADLTVTQEDAPESSGSAIMGVDLGIKVPAVAHIGGKGT
RFFGNGRSQRSMRRRFYARRKTLQKAKKLRAVRKSKGKEARWMKTINHQLSRQIVNHAHA
LGVGTIKIEALQGIRKGTTRKSRGAAARKNNRMTNTWSFSQLTLFITYKAQRQGITVEQV
DPAYTSQDCPACRARNGAQDRTYVCSECGWRGHRDTVGAINISRRAGLSGHRRGATGA (SEQ ID NO: 261)
>Cas14u.2|3300002172.a|JGI24730J26740_1002785|496..1605|revcom
MLQTLLVKLDPSKEQYKMLYETMERFNEACNQIAETVFAIHSANKIEVQKTVYYPIREKF
GLSAQLTILAIRKVCEAYKRDKSIKPEFRLDGALVYDQRVLSWKGLDKVSLVTLQGRQII
PIKFGDYQKARMDRIRGQADLILVKGVFYLCVVVEVSEESPYDPKGVLGVDLGIKNLAVD
SDGEVHSGEQTTNTRERLDSLKARLQSKGTKSAKRHLKKLSGRMAKFSKDVNHCISKKLV
AKAKGTLMSIALEDLQGIRDRVTVRKAQRRNLHTWNFGLLRMFVDYKAKIAGVPLVFVDP
RNTSRTCPSCGHVAKANRPTRDEFRCVSCGFAGAADHIAAMNIAFRAEVSQPIVTRFFVQ
SQAPSFRVG (SEQ ID NO: 262)
>Cas14u.3|19ft_2_nophage_noknown_scaffold_0_curated|508188..509648
LAEENTLHLTLAMSLPLNDLPENRTRSELWRRQWLPQKKLSLLLGVNQSVRKAAADCLRW
FEPYQELLWWEPTDPDGKKLLDKEGRPIKRTAGHMRVLRKLEEIAPFRGYQLGSAVKNGL
RHKVADLLLSYAKRKLDPQFTDKTSYPSIGDQFPIVWTGAFVCYEQSITGQLYLYLPLFP
RGSHQEDITNNYDPDRGPALQVFGEKEIARLSRSTSGLLLPLQFDKWGEATFIRGENNPP
TWKATHRRSDKKWLSEVLLREKDFQPKRVELLVRNGRIFVNVACEIPTKPLLEVENFMGV
SFGLEHLVTVVVINRDGNVVHQRQEPARRYEKTYFARLERLRRRGGPFSQELETFHYRQV
AQIVEEALRFKSVPAVEQVGNIPKGRYNPRLNLRLSYWPFGKLADLTSYKAVKEGLPKPY
SVYSATAKMLCSTCGAANKEGDQPISLKGPTVYCGNCGTRHNTGENTALNLARRAQELFV
KGVVAR. (SEQ ID NO: 263)
>Cas14u.4|rifcsp2_19_4_full_scaffold_168_curated|84455..85657
MTTQKTYNFCFYDQRFFELSKEAGEVYSRSLEEFWKIYDETGVWLSKFDLQKHMRNKLER
KLLHSDSFLGAMQQVHANLASWKQAKKVVPDACPPRKPKFLQAILFKKSQIKYKNGFLRL
TLGTEKEFLYLKWDINIPLPIYGSVTYSKTRGWKINLCLETEVEQKNLSENKYLSIDLGV
KRVATIFDGENTITLSGKKFMGLMHYRNKLNGKTQSRLSHKKKGSNNYKKIQRAKRKTTD
RLLNIQKEMLHKYSSFIVNYAIRNDIGNIIIGDNSSTHDSPNMRGKTNQKISQNPEQKLK
NYIKYKFESISGRVDIVPEPYTSRKCPHCKNIKKSSPKGRTYKCKKCGFIFDRDGVGAIN
IYNENVSFGQIISPGRIRSLTEPIGMKFHNEIYFKSYVAA. (SEQ ID NO: 264)
>Cas14u.5|3300012532.a|Ga0137373_10000316|3286..5286
MATLVYRYGVRAHGSARQQDAVVSDPAMLEQLRLGHELRNALVGVQHRYEDGKRAVWSGF
ASVAAADHRVTTGETAVAELEKQARAEHSADRTAATRQGTAESLKAARAAVKQARADRKA
AMAAVAEQAKPKIQALGDDRDAEIKDLYRRFCQDGVLLPRCGRCAGDLRSDGDCTDCGAA
HEPRKLYWATYNAIREDHQTAVKLVEAKRKAGQPARLRFRRWTGDGTLTVQLQRMHGPAC
RCVTCAEKLTRRARKTDPQAPAVAADPAYPPTDPPRDPALLASGQGKWRNVLQLGTWIPP
GEWSAMSRAERRRVGRSHIGWQLGGGRQLTLPVQLHRQMPADADVAMAQLTRVRVGGRHR
MSVALTAKLPDPPQVQGLPPVALHLGWRQRPDGSLRVATWACPQPLDLPPAVADVVVSHG
GRWGEVIMPARWLADAEVPPRLLGRRDKAMEPVLEALADWLEAHTEACTARMTPALVRRW
RSQGRLAGLTNRWRGQPPTGSAEILTYLEAWRIQDKLLWERESHLRRRLAARRDDAWRRV
ASWLARHAGVLVVDDADIAELRRRDDPADTDPTMPASAAQAARARAALAAPGRLRHLATI
TATRDGLGVHTVASAGLTRLHRKCGHQAQPDPRYAASAVVTCPGCGNGYDQDYNAAMLML
DRQQQP (SEQ ID NO: 265)
>Cas14u.6|3300006028.a|Ga0070717_10000077|54519..56201|revcom
MTVRTYKYRAYPTPEQAEALTSWLRFASQLYNAALEHRKNAWGRHDAHGRGFRFWDGDAA
PRKKSDPPGRWVYRGGGGAHISKNDQGKLLTEFRREHAELLPPGMPALVQHEVLARLERS
MAAFFQRATKGQKAGYPRWRSEHRYDSLTFGLTSPSKERFDPETGESLGRGKTVGAGTYH
NGDLRLTGLGELRILEHRRIPMGAIPKSVIVRRSGKRWFVSIAMEMPSVEPAASGRPAVG
LDMGVVTWGTAFTADTSAAAALVADLRRMATDPSDCRRLEELEREAAQLSEVLAHCRARG
LDPARPRRCPKELTKLYRRSLHRLGELDRACARIRRRLQAAHDIAEPVPDEAGSAVLIEG
SNAGMRHARRVARTQRRVARRTRAGHAHSNRRKKAVQAYARAKERERSARGDHRHKVSRA
LVRQFEEISVEALDIKQLTVAPEHNPDPQPDLPAHVQRRRNRGELDAAWGAFFAALDYKA
ADAGGRVARKPAPHTTQECARCGTLVPKPISLRVHRCPACGYTAPRTVNSARNVLQRPLE
EPGRAGPSGANGRGVPHAVA. (SEQ ID NO: 266)
>Cas14u.7|3300001256.a|JGI12210J13797_10004690|5792..7006
MNCRYRYRIYPTPGQRQSLARLFGCVRVVWNDALFLCRQSEKLPKNSELQKLCITQAKKT
EARGWLGQVSAIPLQQSVADLGVAFKNFFQSRSGKRKGKKVNPPRVKRRNNRQGARFTRG
GFKVKTSKVYLARIGDIKIKWSRPLPSEPSSVTVIKDCAGQYFLSFVVEVKPEIKPPKNP
SIGIDLGLKTFASCSNGEKIDSPDYSRLYRKLKRCQRRLAKRQRGSKRRERMRVKVAKLN
AQIRDKRKDFLHKLSTKVVNENQVIALEDLNVGGMLKNRKLSRAISQAGWYEFRSLCEGK
AEKHNRDFRVISRWEPTSQVCSECGYRWGKIDLSVRSIVCINCGVEHDRDDNASVNIEQA
GLKVGVGHTHDSKRTGSACKTSNGAVCVEPSTHREYVQLTLFDW. (SEQ ID NO: 267)
>Cas14u.8|3300005660.a|Ga0073904_10021651|765..1943
MKSRWTFRCYPTPEQEQHLARTFGCVRFVWNWALRARTDAFRAGERIGYPATDKALTLLK
QQPETVWLNEVSSVCLQQALRDLQVAFSNFFDKRAAHPSFKRKEARQSANYTERGFSFDH
ERRILKLAKIGAIKVKWSRKAIPHPSSIRLIRTASGKYFVSLVVETQPAPMPETGESVGV
DFGVARLATLSNGERISNPKHGAKWQRRLAFYQKRLARATKGSKRRMRIKRHVARIHEKI
GNSRSDTLHKLSTDLVTRFDLICVEDLNLRGMVKNHSLARSLHDASIGSAIRMIEEKAER
YGKNVVKIDRWFPSSKTCSDCGHIVEQLPLNVREWTCPECGTTHDRDANAAANILAVGQT
VSAHGGTVRRSRAKASERKSQRSANRQGVNRA. (SEQ ID NO:268)

The application's sequence listing, which the Patent Office published only in electronic form, follows.

SEQUENCE LISTING (277 sequences)

SEQ ID NO: 1 - RNA, 10 nt, Artificial Sequence
  Description of Artificial Sequence: Synthetic oligonucleotide
aaaaaaaaaa

SEQ ID NO: 2 - RNA, 10 nt, Artificial Sequence
  Description of Artificial Sequence: Synthetic oligonucleotide
aaaauuuuuu

SEQ ID NO: 3 - RNA, 28 nt, Artificial Sequence
  Description of Artificial Sequence: Synthetic oligonucleotide
aaaagccugaaccaccaggcuauaucug

SEQ ID NO: 4 - RNA, 60 nt, Artificial Sequence
  Description of Artificial Sequence: Synthetic oligonucleotide
auuuagaccaccccaaaaaugaaggggacuaaaacacagauauagccuggugguucaggc

SEQ ID NO: 5 - RNA, 52 nt, Artificial Sequence
  Description of Artificial Sequence: Synthetic oligonucleotide
uagaccaccccaaaaaugaaggggacuaaaacuuguuucuuucuguuguuuc

SEQ ID NO: 6 - RNA, 59 nt, Artificial Sequence
  Description of Artificial Sequence: Synthetic oligonucleotide
gacgagagaccgacacaaaaauuggccgaaaggccccacacacaugugucggucucucg

SEQ ID NO: 7 - RNA, 59 nt, Artificial Sequence
  Description of Artificial Sequence: Synthetic oligonucleotide
gacgagagaccgacacaaaaauugggcuucggcccccacacacaugugucggucucucg

SEQ ID NO: 8 - RNA, 23 nt, Artificial Sequence
  Description of Artificial Sequence: Synthetic oligonucleotide
gaaacaacagaaagaaacaacuu

SEQ ID NO: 9 - RNA, 44 nt, Artificial Sequence
  Description of Artificial Sequence: Synthetic oligonucleotide
gaaacaacagaaagaaacaacuugcaagaaacaucuguuguuuc

SEQ ID NO: 10 - RNA, 41 nt, Artificial Sequence
  Description of Artificial Sequence: Synthetic oligonucleotide
gaaacaacagaaagaaacaacuugcaagaucuuucuguugu

SEQ ID NO: 11 - RNA, 42 nt, Artificial Sequence
  Description of Artificial Sequence: Synthetic oligonucleotide
gaaacaacagaaagaaacaacuugcaauuucuuucuguuguu

SEQ ID NO: 12 - RNA, 44 nt, Artificial Sequence
  Description of Artificial Sequence: Synthetic oligonucleotide
gaaacaacagaaagaaacaacuugcaauuucuuucuguuguuuc

SEQ ID NO: 13 - RNA, 53 nt, Artificial Sequence
  Description of Artificial Sequence: Synthetic oligonucleotide
gaaacaacagaaagaaacaaauuggccgaaaggccccacacacauuucuguug

SEQ ID NO: 14 - RNA, 61 nt, Artificial Sequence
  Description of Artificial Sequence: Synthetic oligonucleotide
gaaacaacagaaagaaacaaauuggccgaaaggccccacacacaguuucuuucuguuguuu

SEQ ID NO: 15 - RNA, 64 nt, Artificial Sequence
  Description of Artificial Sequence: Synthetic oligonucleotide
gaaacaacagaaagaaacaaauuggccgaaaggccccacacacauuguuucuuucuguuguuuc

SEQ ID NO: 16 - RNA, 53 nt, Artificial Sequence
  Description of Artificial Sequence: Synthetic oligonucleotide
gaaacaacagaaagaaacaaauugggcuucggcccccacacacauuucuguug

SEQ ID NO: 17 - RNA, 61 nt, Artificial Sequence
  Description of Artificial Sequence: Synthetic oligonucleotide
gaaacaacagaaagaaacaaauugggcuucggcccccacacacaguuucuuucuguuguuu

SEQ ID NO: 18 - RNA, 64 nt, Artificial Sequence
  Description of Artificial Sequence: Synthetic oligonucleotide
gaaacaacagaaagaaacaaauugggcuucggcccccacacacauuguuucuuucuguuguuuc

SEQ ID NO: 19 - RNA, 44 nt, Artificial Sequence
  Description of Artificial Sequence: Synthetic oligonucleotide
gaaacaacagaaagaaacaaguuucaauuucuuucuguuguuuc

SEQ ID NO: 20 - RNA, 52 nt, Artificial Sequence
  Description of Artificial Sequence: Synthetic oligonucleotide
uagaccaccccaaaaaugaaggggacuaaaacgcgagaacaggacgaagcag

SEQ ID NO: 21 - RNA, 74 nt, Artificial Sequence
  Description of Artificial Sequence: Synthetic oligonucleotide
uagaccaccccaaaaaugaaggggacuaaaacgaaacaacagaaagaaacaaguuauacauacuuucuguuguu

SEQ ID NO: 22 - RNA, 75 nt, Artificial Sequence
  Description of Artificial Sequence: Synthetic oligonucleotide
uagaccaccccaaaaaugaaggggacuaaaacgaaacaacagaaagaaacaaguuauacauacuuucuguuguuu

SEQ ID NO: 23 - RNA, 78 nt, Artificial Sequence
  Description of Artificial Sequence: Synthetic oligonucleotide
uagaccaccccaaaaaugaaggggacuaaaacgaaacaacagaaagaaacaaguuauacauacuuucuguuguuucgu

SEQ ID NO: 24 - RNA, 78 nt, Artificial Sequence
  Description of Artificial Sequence: Synthetic oligonucleotide
uagaccaccccaaaaaugaaggggacuaaaacgaaacaacagaaagaaacaaguuauacauacuuccuguugucucgu

SEQ ID NO: 25 - RNA, 20 nt, Artificial Sequence
  Description of Artificial Sequence: Synthetic oligonucleotide
gacgagagaccaacacaaaa

SEQ ID NO: 26 - RNA, 40 nt, Artificial Sequence
  Description of Artificial Sequence: Synthetic oligonucleotide
gacgagagaccgacacaaaacuuggacuuuugugucgguc

SEQ ID NO: 27 - RNA, 40 nt, Artificial Sequence
  Description of Artificial Sequence: Synthetic oligonucleotide
gacgagagaccgacacaaaacuuggacacugucggucucu

SEQ ID NO: 28 - RNA, 41 nt, Artificial Sequence
  Description of Artificial Sequence: Synthetic oligonucleotide
gacgagagaccgacacaaaacuuggacagugucggucucuc

SEQ ID NO: 29 - RNA, 25 nt, Artificial Sequence
  Description of Artificial Sequence: Synthetic oligonucleotide
guuuuaguccuuuuuccuucauuuu

SEQ ID NO: 30 - RNA, 25 nt, Artificial Sequence
  Description of Artificial Sequence: Synthetic oligonucleotide
uucauuuuuguuuuuggguggucua

SEQ ID NO: 31 - RNA, 37 nt, Artificial Sequence
  Description of Artificial Sequence: Synthetic oligonucleotide
guuuuaguccccuucauuuuuuuuuugggguggucua

SEQ ID NO: 32 - RNA, 25 nt, Artificial Sequence
  Description of Artificial Sequence: Synthetic oligonucleotide
uuuuguguuguuuuugucucucguc

SEQ ID NO: 33 - RNA, 20 nt, Artificial Sequence
  Description of Artificial Sequence: Synthetic oligonucleotide
uguauggaaaaguuaugugc

SEQ ID NO: 34 - RNA, 20 nt, Artificial Sequence
  Description of Artificial Sequence: Synthetic oligonucleotide
gcagauaguaaaauuguuca

SEQ ID NO: 35 - RNA, 20 nt, Artificial Sequence
  Description of Artificial Sequence: Synthetic oligonucleotide
agacuucauuaagauguggu

SEQ ID NO: 36 - RNA, 20 nt, Artificial Sequence
  Description of Artificial Sequence: Synthetic oligonucleotide
auggguugggauuauccuaa

SEQ ID NO: 37 - RNA, 20 nt, Artificial Sequence
  Description of Artificial Sequence: Synthetic oligonucleotide
ugggauuauccuaaauguga

SEQ ID NO: 38 - RNA, 20 nt, Artificial Sequence
  Description of Artificial Sequence: Synthetic oligonucleotide
gggauuauccuaaaugugau

SEQ ID NO: 39 - DNA, 500 bp, Artificial Sequence
  Description of Artificial Sequence: Synthetic polynucleotide
gaaattaatacgactcactataggggtgagtttaaattggcttcacatatgtattgttctttctaccctccagatgaggatgaagaagaaggtgattgtgaagaagaagagtttgagccatcaactcaatatgagtatggtactgaagatgattaccaaggtaaacctttggaatttggtgccacttctgctgctcttcaacctgaagaagagcaagaagaagattggttagatgatgatagtcaacaaactgttggtcaacaagacggcagtgaggacaatcagacaactactattcaaacaattgttgaggttcaacctcaattagagatggaacttacaccagttgttcagactattgaagtgaatagttttagtggttatttaaaacttactgacaatgtatacattaaaaatgcagacattgtggaagaagctaaaaaggtaaaaccaacagtggttgttaatgcagccaatgtttaccttaaacatggaggagg

SEQ ID NO: 40 - DNA, 931 bp, Artificial Sequence
  Description of Artificial Sequence: Synthetic polynucleotide
ccaaattggctactaccgaagagctaccagacgaattcgtggtggtgacggtaaaatgaaagatctcagtccaagatggtatttctactacctaggaactgggccagaagctggacttccctatggtgctaacaaagacggcatcatatgggttgcaactgagggagccttgaatacaccaaaagatcacattggcacccgcaatcctgctaacaatgctgcaatcgtgctacaacttcctcaaggaacaacattgccaaaaggcttctacgcagaagggagcagaggcggcagtcaagcctcttctcgttcctcatcacgtagtcgcaacagttcaagaaattcaactccaggcagcagtaggggaacttctcctgctagaatggctggcaatggcggtgatgctgctcttgctttgctgctgcttgacagattgaaccagcttgagagcaaaatgtctggtaaaggccaacaacaacaaggccaaactgtcactaagaaatctgctgctgaggcttctaagaagcctcggcaaaaacgtactgccactaaagcatacaatgtaacacaagctttcggcagacgtggtccagaacaaacccaaggaaattttggggaccaggaactaatcagacaaggaactgattacaaacattggccgcaaattgcacaatttgcccccagcgcttcagcgttcttcggaatgtcgcgcattggcatggaagtcacaccttcgggaacgtggttgacctacacaggtgccatcaaattggatgacaaagatccaaatttcaaagatcaagtcattttgctgaataagcatattgacgcatacaaaacattcccaccaacagagcctaaaaaggacaaaaagaagaaggctgatgaaactcaagccttaccgcagagacagaagaaacagcaaactgtg

SEQ ID NO: 41 - DNA, 598 bp, Artificial Sequence
  Description of Artificial Sequence: Synthetic polynucleotide
actattaccagctgtactcaactcaattgagtacagacactggtgttgaacatgttaccttcttcatctacaataaaattgttgatgagcctgaagaacatgtccaaattcacacaatcgacggttcatccggagttgttaatccagtaatggaaccaatttatgatgaaccgacgacgactactagcgtgcctttgtaagcacaagctgatgagtacgaacttatgtactcattcgtttcggaagagacaggtacgttaatagttaatagcgtacttctttttcttgctttcgtggtattcttgctagttacactagccatccttactgcgcttcgattgtgtgcgtactgctgcaatattgttaacgtgagtcttgtaaaaccttctttttacgtttactctcgtgttaaaaatctgaattcttctagagttcctgatcttctggtctaaacgaactaaatattatattagtttttctgtttggaactttaattttagccatggcagattccaacggtactattaccgttgaagagcttaaaaagctccttgaacaatggaacctagtaataggtttcctattccttacatggatt

SEQ ID NO: 42 - RNA, 52 nt, Artificial Sequence
  Description of Artificial Sequence: Synthetic oligonucleotide
uagaccaccccaaaaaugaaggggacuaaaacaauuugauggcaccugugua

SEQ ID NO: 43 - RNA, 52 nt, Artificial Sequence
  Description of Artificial Sequence: Synthetic oligonucleotide
uagaccaccccaaaaaugaaggggacuaaaacuagaucuguguggccaaccu

SEQ ID NO: 44 - RNA, 52 nt, Artificial Sequence
  Description of Artificial Sequence: Synthetic oligonucleotide
uagaccaccccaaaaaugaaggggacuaaaacgcaccagcuguccaaccuga

SEQ ID NO: 45 - RNA, 52 nt, Artificial Sequence
  Description of Artificial Sequence: Synthetic oligonucleotide
uagaccaccccaaaaaugaaggggacuaaaacauaauaagcugcagcaccag

SEQ ID NO: 46 - RNA, 52 nt, Artificial Sequence
  Description of Artificial Sequence: Synthetic oligonucleotide
uagaccaccccaaaaaugaaggggacuaaaacuaacccacauaauaagcugc

SEQ ID NO: 47 - RNA, 52 nt, Artificial Sequence
  Description of Artificial Sequence: Synthetic oligonucleotide
uagaccaccccaaaaaugaaggggacuaaaacagauaacccacauaauaagc

SEQ ID NO: 48 - RNA, 52 nt, Artificial Sequence
  Description of Artificial Sequence: Synthetic oligonucleotide
uagaccaccccaaaaaugaaggggacuaaaacgaagauaacccacauaauaa

SEQ ID NO: 49 - RNA, 52 nt, Artificial Sequence
  Description of Artificial Sequence: Synthetic oligonucleotide
uagaccaccccaaaaaugaaggggacuaaaacugaagauaacccacauaaua

SEQ ID NO: 50 - RNA, 52 nt, Artificial Sequence
  Description of Artificial Sequence: Synthetic oligonucleotide
uagaccaccccaaaaaugaaggggacuaaaacuugaagauaacccacauaau

SEQ ID NO: 51 - RNA, 52 nt, Artificial Sequence
  Description of Artificial Sequence: Synthetic oligonucleotide
uagaccaccccaaaaaugaaggggacuaaaacguugaagauaacccacauaa

SEQ ID NO: 52 - RNA, 52 nt, Artificial Sequence
  Description of Artificial Sequence: Synthetic oligonucleotide
uagaccaccccaaaaaugaaggggacuaaaaccucaccacuacgaccguacu

SEQ ID NO: 53 - RNA, 52 nt, Artificial Sequence
  Description of Artificial Sequence: Synthetic oligonucleotide
uagaccaccccaaaaaugaaggggacuaaaacacaugagggacaaggacacc

SEQ ID NO: 54 - RNA, 52 nt, Artificial Sequence
  Description of Artificial Sequence: Synthetic oligonucleotide
uagaccaccccaaaaaugaaggggacuaaaacaucaucuucaguaccauacu

SEQ ID NO: 55 - RNA, 52 nt, Artificial Sequence
  Description of Artificial Sequence: Synthetic oligonucleotide
uagaccaccccaaaaaugaaggggacuaaaacaaguggcaccaaauuccaaa

SEQ ID NO: 56 - RNA, 52 nt, Artificial Sequence
  Description of Artificial Sequence: Synthetic oligonucleotide
uagaccaccccaaaaaugaaggggacuaaaacuaucaucaucuaaccaaucu

SEQ ID NO: 57 - RNA, 52 nt, Artificial Sequence
  Description of Artificial Sequence: Synthetic oligonucleotide
uagaccaccccaaaaaugaaggggacuaaaacuccucacugccgucuuguug

SEQ ID NO: 58 - RNA, 52 nt, Artificial Sequence
  Description of Artificial Sequence: Synthetic oligonucleotide
uagaccaccccaaaaaugaaggggacuaaaacuaaguuccaucucuaauuga

SEQ ID NO: 59 - RNA, 52 nt, Artificial Sequence
  Description of Artificial Sequence: Synthetic oligonucleotide
uagaccaccccaaaaaugaaggggacuaaaacacuucaguacaucaaacgaa

SEQ ID NO: 60 - RNA, 52 nt, Artificial Sequence
  Description of Artificial Sequence: Synthetic oligonucleotide
uagaccaccccaaaaaugaaggggacuaaaaccauucccugcgcguccucug

SEQ ID NO: 61 - RNA, 52 nt, Artificial Sequence
  Description of Artificial Sequence: Synthetic oligonucleotide
uagaccaccccaaaaaugaaggggacuaaaaccgcaggcaagauuauccauu

SEQ ID NO: 62 - RNA, 52 nt, Artificial Sequence
  Description of Artificial Sequence: Synthetic oligonucleotide
uagaccaccccaaaaaugaaggggacuaaaacaagugaggccauaauucuaa

SEQ ID NO: 63 - RNA, 52 nt, Artificial Sequence
  Description of Artificial Sequence: Synthetic oligonucleotide
uagaccaccccaaaaaugaaggggacuaaaacaccauagggaaguccagcuu

SEQ ID NO: 64 - RNA, 52 nt, Artificial Sequence
  Description of Artificial Sequence: Synthetic oligonucleotide
uagaccaccccaaaaaugaaggggacuaaaacccgucuuuguuagcaccaua

SEQ ID NO: 65 - RNA, 52 nt, Artificial Sequence
  Description of Artificial Sequence: Synthetic oligonucleotide
uagaccaccccaaaaaugaaggggacuaaaacacauuccgaagaacgcugaa

SEQ ID NO: 66 - RNA, 52 nt, Artificial Sequence
  Description of Artificial Sequence: Synthetic oligonucleotide
uagaccaccccaaaaaugaaggggacuaaaacauuucuugaacuguugcgac

SEQ ID NO: 67 - RNA, 52 nt, Artificial Sequence
  Description of Artificial Sequence: Synthetic oligonucleotide
uagaccaccccaaaaaugaaggggacuaaaacccauugccagccauucuagc

SEQ ID NO: 68 - RNA, 52 nt, Artificial Sequence
  Description of Artificial Sequence: Synthetic oligonucleotide
uagaccaccccaaaaaugaaggggacuaaaacgagcagcaucaccgccauug

SEQ ID NO: 69 - RNA, 52 nt, Artificial Sequence
  Description of Artificial Sequence: Synthetic oligonucleotide
uagaccaccccaaaaaugaaggggacuaaaacucaagcagcagcaaagcaag

SEQ ID NO: 70 - RNA, 52 nt, Artificial Sequence
  Description of Artificial Sequence: Synthetic oligonucleotide
uagaccaccccaaaaaugaaggggacuaaaacuuugccgaggcuucuuagaa

SEQ ID NO: 71 - RNA, 52 nt, Artificial Sequence
  Description of Artificial Sequence: Synthetic oligonucleotide
uagaccaccccaaaaaugaaggggacuaaaacgcuuguguuacauuguaugc

SEQ ID NO: 72 - RNA, 52 nt, Artificial Sequence
  Description of Artificial Sequence: Synthetic oligonucleotide
uagaccaccccaaaaaugaaggggacuaaaacacuugaucuuugaaauuugg

SEQ ID NO: 73 - RNA, 52 nt, Artificial Sequence
  Description of Artificial Sequence: Synthetic oligonucleotide
uagaccaccccaaaaaugaaggggacuaaaaccagcaaaaugacuugaucuu

SEQ ID NO: 74 - RNA, 52 nt, Artificial Sequence
  Description of Artificial Sequence: Synthetic oligonucleotide
uagaccaccccaaaaaugaaggggacuaaaacguuucaucagccuucuucuu

SEQ ID NO: 75 - RNA, 52 nt, Artificial Sequence
  Description of Artificial Sequence: Synthetic oligonucleotide
uagaccaccccaaaaaugaaggggacuaaaacgcgguaaggcuugaguuuca

SEQ ID NO: 76 - RNA, 52 nt, Artificial Sequence
  Description of Artificial Sequence: Synthetic oligonucleotide
uagaccaccccaaaaaugaaggggacuaaaacgaaaucauccaaaucugcag

SEQ ID NO: 77 - RNA, 52 nt, Artificial Sequence
  Description of Artificial Sequence: Synthetic oligonucleotide
uagaccaccccaaaaaugaaggggacuaaaacuauaucguaaacggaaaagc

SEQ ID NO: 78 - RNA, 52 nt, Artificial Sequence
  Description of Artificial Sequence: Synthetic oligonucleotide
uagaccaccccaaaaaugaaggggacuaaaacuagaucggcgccguaacuau

SEQ ID NO: 79 - RNA, 52 nt, Artificial Sequence
  Description of Artificial Sequence: Synthetic oligonucleotide
uagaccaccccaaaaaugaaggggacuaaaacucgucgccuaagucaaauga

SEQ ID NO: 80 - RNA, 52 nt, Artificial Sequence
  Description of Artificial Sequence: Synthetic oligonucleotide
uagaccaccccaaaaaugaaggggacuaaaacccaguuuucuugaaaaucuu

SEQ ID NO: 81 - RNA, 52 nt, Artificial Sequence
  Description of Artificial Sequence: Synthetic oligonucleotide
uagaccaccccaaaaaugaaggggacuaaaacuaacaccacugcuauguuua

SEQ ID NO: 82 - RNA, 52 nt, Artificial Sequence
  Description of Artificial Sequence: Synthetic oligonucleotide
uagaccaccccaaaaaugaaggggacuaaaacccccuccguuaagcucacgc

SEQ ID NO: 83 - RNA, 52 nt, Artificial Sequence
  Description of Artificial Sequence: Synthetic oligonucleotide
uagaccaccccaaaaaugaaggggacuaaaaccauagcgaguguaugccccu

SEQ ID NO: 84 - RNA, 52 nt, Artificial Sequence
  Description of Artificial Sequence: Synthetic oligonucleotide
uagaccaccccaaaaaugaaggggacuaaaacgucuuuaaugcacucaagag

SEQ ID NO: 85 - RNA, 52 nt, Artificial Sequence
  Description of Artificial Sequence: Synthetic oligonucleotide
uagaccaccccaaaaaugaaggggacuaaaacguucggacaaagugcaugaa

SEQ ID NO: 86 - DNA, 79 bp, Artificial Sequence
  Description of Artificial Sequence: Synthetic oligonucleotide
tacacaggtgccatcaaattgttttagtccccttcatttttggggtggtctacctatagtgagtcgtattaatttcgac

SEQ ID NO: 87 - DNA, 79 bp, Artificial Sequence
  Description of Artificial Sequence: Synthetic oligonucleotide
aggttggccacacagatctagttttagtccccttcatttttggggtggtctacctatagtgagtcgtattaatttcgac

SEQ ID NO: 88 - DNA, 79 bp, Artificial Sequence
  Description of Artificial Sequence: Synthetic oligonucleotide
tcaggttggacagctggtgcgttttagtccccttcatttttggggtggtctacctatagtgagtcgtattaatttcgac

SEQ ID NO: 89 - DNA, 79 bp, Artificial Sequence
  Description of Artificial Sequence: Synthetic oligonucleotide
ctggtgctgcagcttattatgttttagtccccttcatttttggggtggtctacctatagtgagtcgtattaatttcgac

SEQ ID NO: 90 - DNA, 79 bp, Artificial Sequence
  Description of Artificial Sequence: Synthetic oligonucleotide
gcagcttattatgtgggttagttttagtccccttcatttttggggtggtctacctatagtgagtcgtattaatttcgac

SEQ ID NO: 91 - DNA, 79 bp, Artificial Sequence
  Description of Artificial Sequence: Synthetic oligonucleotide
gcttattatgtgggttatctgttttagtccccttcatttttggggtggtctacctatagtgagtcgtattaatttcgac

SEQ ID NO: 92 - DNA, 79 bp, Artificial Sequence
  Description of Artificial Sequence: Synthetic oligonucleotide
ttattatgtgggttatcttcgttttagtccccttcatttttggggtggtctacctatagtgagtcgtattaatttcgac

SEQ ID NO: 93 - DNA, 79 bp, Artificial Sequence
  Description of Artificial Sequence: Synthetic oligonucleotide
tattatgtgggttatcttcagttttagtccccttcatttttggggtggtctacctatagtgagtcgtattaatttcgac

SEQ ID NO: 94 - DNA, 79 bp, Artificial Sequence
  Description of Artificial Sequence: Synthetic oligonucleotide
attatgtgggttatcttcaagttttagtccccttcatttttggggtggtctacctatagtgagtcgtattaatttcgac

SEQ ID NO: 95 - DNA, 79 bp, Artificial Sequence
  Description of Artificial Sequence: Synthetic oligonucleotide
ttatgtgggttatcttcaacgttttagtccccttcatttttggggtggtctacctatagtgagtcgtattaatttcgac

SEQ ID NO: 96 - DNA, 59 bp, Artificial Sequence
  Description of Artificial Sequence: Synthetic oligonucleotide
tcatccaatttgatggcacctgtgtaggtcaacctatagtgagtcgtattaatttcgac

SEQ ID NO: 97 - DNA, 59 bp, Artificial Sequence
  Description of Artificial Sequence: Synthetic oligonucleotide
agccattagatctgtgtggccaacctcttctgcctatagtgagtcgtattaatttcgac

SEQ ID NO: 98 - DNA, 59 bp, Artificial Sequence
  Description of Artificial Sequence: Synthetic oligonucleotide
gctgcagcaccagctgtccaacctgaagaagacctatagtgagtcgtattaatttcgac

SEQ ID NO: 99 - DNA, 59 bp, Artificial Sequence
  Description of Artificial Sequence: Synthetic oligonucleotide
acccacataataagctgcagcaccagctgtcccctatagtgagtcgtattaatttcgac

SEQ ID NO: 100 - DNA, 59 bp, Artificial Sequence
  Description of Artificial Sequence: Synthetic oligonucleotide
tgaagataacccacataataagctgcagcacccctatagtgagtcgtattaatttcgac

SEQ ID NO: 101 - DNA, 59 bp, Artificial Sequence
  Description of Artificial Sequence: Synthetic oligonucleotide
ggttgaagataacccacataataagctgcagccctatagtgagtcgtattaatttcgac

SEQ ID NO: 102 - DNA, 59 bp, Artificial Sequence
  Description of Artificial Sequence: Synthetic oligonucleotide
taggttgaagataacccacataataagctgcacctatagtgagtcgtattaatttcgac

SEQ ID NO: 103 - DNA, 59 bp, Artificial Sequence
  Description of Artificial Sequence: Synthetic oligonucleotide
ctaggttgaagataacccacataataagctgccctatagtgagtcgtattaatttcgac

SEQ ID NO: 104 - DNA, 59 bp, Artificial Sequence
  Description of Artificial Sequence: Synthetic oligonucleotide
cctaggttgaagataacccacataataagctgcctatagtgagtcgtattaatttcgac

SEQ ID NO: 105 - DNA, 59 bp, Artificial Sequence
  Description of Artificial Sequence: Synthetic oligonucleotide
tcctaggttgaagataacccacataataagctcctatagtgagtcgtattaatttcgac

SEQ ID NO: 106 - DNA, 7 bp, Artificial Sequence
  Description of Artificial Sequence: Synthetic oligonucleotide
ttttttt

SEQ ID NO: 107 - DNA, 15 bp, Artificial Sequence
  Description of Artificial Sequence: Synthetic oligonucleotide
  Description of Combined DNA/RNA Molecule: Synthetic oligonucleotide
cgctcuuuuugagcg

SEQ ID NO: 108 - DNA, 17 bp, Artificial Sequence
  Description of Artificial Sequence: Synthetic oligonucleotide
  Description of Combined DNA/RNA Molecule: Synthetic oligonucleotide
cgctcuuuuuuugagcg

SEQ ID NO: 109 - DNA, 19 bp, Artificial Sequence
  Description of Artificial Sequence: Synthetic oligonucleotide
  Description of Combined DNA/RNA Molecule: Synthetic oligonucleotide
cgctcuuuuuuuuugagcg

SEQ ID NO: 110 - RNA, 5 nt, Artificial Sequence
  Description of Artificial Sequence: Synthetic oligonucleotide
ccccc

SEQ ID NO: 111 - RNA, 5 nt, Artificial Sequence
  Description of Artificial Sequence: Synthetic oligonucleotide
uuuaa

SEQ ID NO: 112 - DNA, 8 bp, Artificial Sequence
  Description of Artificial Sequence: Synthetic oligonucleotide
ttattatt

SEQ ID NO: 113 - RNA, 5 nt, Artificial Sequence
  Description of Artificial Sequence: Synthetic oligonucleotide
uuuuu

SEQ ID NO: 114 - RNA, 5 nt, Artificial Sequence
  Description of Artificial Sequence: Synthetic oligonucleotide
aaaaa

SEQ ID NO: 115 - protein, 1389 aa, Leptotrichia shahii
MGNLFGHKRWYEVRDKKDFKIKRKVKVKRNYDGNKYILNINENNNKEKIDNNKFIRKYINYKKNDNILKEFTRKFHAGNILFKLKGKEGIIRIENNDDFLETEEVVLYIEAYGKSEKLKALGITKKKIIDEAIRQGITKDDKKIEIKRQENEEEIEIDIRDEYTNKTLNDCSIILRIIENDELETKKSIYEIFKNINMSLYKIIEKIIENETEKVFENRYYEEHLREKLLKDDKIDVILTNFMEIREKIKSNLEILGFVKFYLNVGGDKKKSKNKKMLVEKILNINVDLTVEDIADFVIKELEFWNITKRIEKVKKVNNEFLEKRRNRTYIKSYVLLDKHEKFKIERENKKDKIVKFFVENIKNNSIKEKIEKILAEFKIDELIKKLEKELKKGNCDTEIFGIFKKHYKVNFDSKKFSKKSDEEKELYKIIYRYLKGRIEKILVNEQKVRLKKMEKIEIEKILNESILSEKILKRVKQYTLEHIMYLGKLRHNDIDMTTVNTDDFSRLHAKEELDLELITFFASTNMELNKIFSRENINNDENIDFFGGDREKNYVLDKKILNSKIKIIRDLDFIDNKNNITNNFIRKFTKIGTNERNRILHAISKERDLQGTQDDYNKVINIIQNLKISDEEVSKALNLDVVFKDKKNIITKINDIKISEENNNDIKYLPSFSKVLPEILNLYRNNPKNEPFDTIETEKIVLNALIYVNKELYKKLILEDDLEENESKNIFLQELKKTLGNIDEIDENIIENYYKNAQISASKGNNKAIKKYQKKVIECYIGYLRKNYEELFDFSDFKMNIQEIKKQIKDINDNKTYERITVKTSDKTIVINDDFEYIISIFALLNSNAVINKIRNRFFATSVWLNTSEYQNIIDILDEIMQLNTLRNECITENWNLNLEEFIQKMKEIEKDFDDFKIQTKKEIFNNYYEDIKNNILTEFKDDINGCDVLEKKLEKIVIFDDETKFEIDKKSNILQDEQRKLSNINKKDLKKKVDQYIKDKDQEIKSKILCRIIFNSDFLKKYKKEIDNLIEDMESENENKFQEIYYPKERKNELYIYKKNLFLNIGNPNFDKIYGLISNDIKMADAKFLFNIDGKNIRKNKISEIDAILKNLNDKLNGYSKEYKEKYIKKLKENDDFFAKNIQNKNYKSFEKDYNRVSEYKKIRDLVEFNYLNKIESYLIDINWKLAIQMARFERDMHYIVNGLRELGIIKLSGYNTGISRAYPKRNGSDGFYTTTAYYKFFDEESYKKFEKICYGFGIDLSENSEINKPENESIRNYISHFYIVRNPFADYSIAEQIDRVSNLLSYSTRYNNSTYASVFEVFKKDVNLDYDELKKKFKLIGNNDILERLMKPKKVSVLELESYNSDYIKNLIIELLTKIENTNDTL

SEQ ID NO: 116 - protein, 1152 aa, Leptotrichia wadei
MKVTKVDGISHKKYIEEGKLVKSTSEENRTSERLSELLSIRLDIYIKNPDNASEEENRIRRENLKKFFSNKVLHLKDSVLYLKNRKEKNAVQDKNYSEEDISEYDLKNKNSFSVLKKILLNEDVNSEELEIFRKDVEAKLNKINSLKYSFEENKANYQKINENNVEKVGGKSKRNIIYDYYRESAKRNDYINNVQEAFDKLYKKEDIEKLFFLIENSKKHEKYKIREYYHKIIGRKNDKENFAKIIYEEIQNVNNIKELIEKIPDMSELKKSQVFYKYYLDKEELNDKNIKYAFCHFVEIEMSQLLKNYVYKRLSNISNDKIKRIFEYQNLKKLIENKLLNKLDTYVRNCGKYNYYLQVGEIATSDFIARNRQNEAFLRNIIGVSSVAYFSLRNILETENENDITGRMRGKTVKNNKGEEKYVSGEVDKIYNENKQNEVKENLKMFYSYDFNMDNKNEIEDFFANIDEAISSIRHGIVHFNLELEGKDIFAFKNIAPSEISKKMFQNEINEKKLKLKIFKQLNSANVFNYYEKDVIIKYLKNTKFNFVNKNIPFVPSFTKLYNKIEDLRNTLKFFWSVPKDKEEKDAQIYLLKNIYYGEFLNKFVKNSKVFFKITNEVIKINKQRNQKTGHYKYQKFENIEKTVPVEYLAIIQSREMINNQDKEEKNTYIDFIQQIFLKGFIDYLNKNNLKYIESNNNNDNNDIFSKIKIKKDNKEKYDKILKNYEKHNRNKEIPHEINEFVREIKLGKILKYTENLNMFYLILKLLNHKELTNLKGSLEKYQSANKEETFSDELELINLLNLDNNRVTEDFELEANEIGKFLDFNENKIKDRKELKKFDTNKIYFDGENIIKHRAFYNIKKYGMLNLLEKIADKAKYKISLKELKEYSNKKNEIEKNYTMQQNLHRKYARPKKDEKFNDEDYKEYEKAIGNIQKYTHLKNKVEFNELNLLQGLLLKILHRLVGYTSIWERDLRFRLKGEFPENHYIEEIFNFDNSKNVKYKSGQIVEKYINFYKELYKDNVEKRSIYSDKKVKKLKQEKKDLYIRNYIAHFNYIPHAEISLLEVLENLRKLLSYDRKLKNAIMKSIVDILKEYGFVATFKIGADKKIEIQTLESEKIVHLKNLKKKKLMTDRNSEELCELVKVMFEYKALE

SEQ ID NO: 117 - protein, 1120 aa, Listeria seeligeri
MWISIKTLIHHLGVLFFCDYMYNRREKKIIEVKTMRITKVEVDRKKVLISRDKNGGKLVYENEMQDNTEQIMHHKKSSFYKSVVNKTICRPEQKQMKKLVHGLLQENSQEKIKVSDVTKLNISNFLNHRFKKSLYYFPENSPDKSEEYRIEINLSQLLEDSLKKQQGTFICWESFSKDMELYINWAENYISSKTKLIKKSIRNNRIQSTESRSGQLMDRYMKDILNKNKPFDIQSVSEKYQLEKLTSALKATFKEAKKNDKEINYKLKSTLQNHERQIIEELKENSELNQFNIEIRKHLETYFPIKKTNRKVGDIRNLEIGEIQKIVNHRLKNKIVQRILQEGKLASYEIESTVNSNSLQKIKIEEAFALKFINACLFASNNLRNMVYPVCKKDILMIGEFKNSFKEIKHKKFIRQWSQFFSQEITVDDIELASWGLRGAIAPIRNEIIHLKKHSWKKFFNNPTFKVKKSKIINGKTKDVTSEFLYKETLFKDYFYSELDSVPELIINKMESSKILDYYSSDQLNQVFTIPNFELSLLTSAVPFAPSFKRVYLKGFDYQNQDEAQPDYNLKLNIYNEKAFNSEAFQAQYSLFKMVYYQVFLPQFTTNNDLFKSSVDFILTLNKERKGYAKAFQDIRKMNKDEKPSEYMSYIQSQLMLYQKKQEEKEKINHFEKFINQVFIKGFNSFIEKNRLTYICHPTKNTVPENDNIEIPFHTDMDDSNIAFWLMCKLLDAKQLSELRNEMIKFSCSLQSTEEISTFTKAREVIGLALLNGEKGCNDWKELFDDKEAWKKNMSLYVSEELLQSLPYTQEDGQTPVINRSIDLVKKYGTETILEKLFSSSDDYKVSAKDIAKLHEYDVTEKIAQQESLHKQWIEKPGLARDSAWTKKYQNVINDISNYQWAKTKVELTQVRHLHQLTIDLLSRLAGYMSIADRDFQFSSNYILERENSEYRVTSWILLSENKNKNKYNDYELYNLKNASIKVSSKNDPQLKVDLKQLRLTLEYLELFDNRLKEKRNNISHFNYLNGQLGNSILELFDDARDVLSYDRKLKNAVSKSLKEILSSHGMEVTFKPLYQTNHHLKIDKLQPKKIHHLGEKSTVSSNQVSNEYCQLVRTLLTMK

SEQ ID NO: 118 - protein, 1340 aa, Unknown
  Description of Unknown: Lachnospiraceae bacterium MA2020 sequence
MQISKVNHKHVAVGQKDRERITGFIYNDPVGDEKSLEDVVAKRANDTKVLFNVFNTKDLYDSQESDKSEKDKEIISKGAKFVAKSFNSAITILKKQNKIYSTLTSQQVIKELKDKFGGARIYDDDIEEALTETLKKSFRKENVRNSIKVLIENAAGIRSSLSKDEEELIQEYFVKQLVEEYTKTKLQKNVVKSIKNQNMVIQPDSDSQVLSLSESRREKQSSAVSSDTLVNCKEKDVLKAFLTDYAVLDEDERNSLLWKLRNLVNLYFYGSESIRDYSYTKEKSVWKEHDEQKANKTLFIDEICHITKIGKNGKEQKVLDYEENRSRCRKQNINYYRSALNYAKNNTSGIFENEDSNHFWIHLIENEVERLYNGIENGEEFKFETGYISEKVWKAVINHLSIKYIALGKAVYNYAMKELSSPGDIEPGKIDDSYINGITSFDYEIIKAEESLQRDISMNVVFATNYLACATVDTDKDFLLFSKEDIRSCTKKDGNLCKNIMQFWGGYSTWKNFCEEYLKDDKDALELLYSLKSMLYSMRNSSFHFSTENVDNGSWDTELIGKLFEEDCNRAARIEKEKFYNNNLHMFYSSSLLEKVLERLYSSHHERASQVPSFNRVFVRKNFPSSLSEQRITPKFTDSKDEQIWQSAVYYLCKEIYYNDFLQSKEAYKLFREGVKNLDKNDINNQKAADSFKQAVVYYGKAIGNATLSQVCQAIMTEYNRQNNDGLKKKSAYAEKQNSNKYKHYPLFLKQVLQSAFWEYLDENKEIYGFISAQIHKSNVEIKAEDFIANYSSQQYKKLVDKVKKTPELQKWYTLGRLINPRQANQFLGSIRNYVQFVKDIQRRAKENGNPIRNYYEVLESDSIIKILEMCTKLNGTTSNDIHDYFRDEDEYAEYISQFVNFGDVHSGAALNAFCNSESEGKKNGIYYDGINPIVNRNWVLCKLYGSPDLISKIISRVNENMIHDFHKQEDLIREYQIKGICSNKKEQQDLRTFQVLKNRVELRDIVEYSEIINELYGQLIKWCYLRERDLMYFQLGFHYLCLNNASSKEADYIKINVDDRNISGAILYQIAAMYINGLPVYYKKDDMYVALKSGKKASDELNSNEQTSKKINYFLKYGNNILGDKKDQLYLAGLELFENVAEHENIIIFRNEIDHFHYFYDRDRSMLDLYSEVFDRFFTYDMKLRKNVVNMLYNILLDHNIVSSFVFETGEKKVGRGDSEVIKPSAKIRLRANNGVSSDVFTYKVGSKDELKIATLPAKNEEFLLNVARLIYYPDMEAVSENMVREGVVKVEKSNDKKGKISRGSNTRSSNQSKYNNKSKNRMNYSMGSIFEKMDLKFD

SEQ ID NO: 119 - protein, 1437 aa, Unknown
  Description of Unknown: Lachnospiraceae bacterium NK4A179 sequence
MKISKVREENRGAKLTVNAKTAVVSENRSQEGILYNDPSRYGKSRKNDEDRDRYIESRLKSSGKLYRIFNEDKNKRETDELQWFLSEIVKKINRRNGLVLSDMLSVDDRAFEKAFEKYAELSYTNRRNKVSGSPAFETCGVDAATAERLKGIISETNFINRIKNNIDNKVSEDIIDRIIAKYLKKSLCRERVKRGLKKLLMNAFDLPYSDPDIDVQRDFIDYVLEDFYHVRAKSQVSRSIKNMNMPVQPEGDGKFAITVSKGGTESGNKRSAEKEAFKKFLSDYASLDERVRDDMLRRMRRLVVLYFYGSDDSKLSDVNEKFDVWEDHAARRVDNREFIKLPLENKLANGKTDKDAERIRKNTVKELYRNQNIGCYRQAVKAVEEDNNGRYFDDKMLNMFFIHRIEYGVEKIYANLKQVTEFKARTGYLSEKIWKDLINYISIKYIAMGKAVYNYAMDELNASDKKEIELGKISEEYLSGISSFDYELIKAEEMLQRETAVYVAFAARHLSSQTVELDSENSDFLLLKPKGTMDKNDKNKLASNNILNFLKDKETLRDTILQYFGGHSLWTDFPFDKYLAGGKDDVDFLTDLKDVIYSMRNDSFHYATENHNNGKWNKELISAMFEHETERMTVVMKDKFYSNNLPMFYKNDDLKKLLIDLYKDNVERASQVPSFNKVFVRKNFPALVRDKDNLGIELDLKADADKGENELKFYNALYYMFKEIYYNAFLNDKNVRERFITKATKVADNYDRNKERNLKDRIKSAGSDEKKKLREQLQNYIAENDFGQRIKNIVQVNPDYTLAQICQLIMTEYNQQNNGCMQKKSAARKDINKDSYQHYKMLLLVNLRKAFLEFIKENYAFVLKPYKHDLCDKADFVPDFAKYVKPYAGLISRVAGSSELQKWYIVSRFLSPAQANHMLGFLHSYKQYVWDIYRRASETGTEINHSIAEDKIAGVDITDVDAVIDLSVKLCGTISSEISDYFKDDEVYAEYISSYLDFEYDGGNYKDSLNRFCNSDAVNDQKVALYYDGEHPKLNRNIILSKLYGERRFLEKITDRVSRSDIVEYYKLKKETSQYQTKGIFDSEDEQKNIKKFQEMKNIVEFRDLMDYSEIADELQGQLINWIYLRERDLMNFQLGYHYACLNNDSNKQATYVTLDYQGKKNRKINGAILYQICAMYINGLPLYYVDKDSSEWTVSDGKESTGAKIGEFYRYAKSFENTSDCYASGLEIFENISEHDNITELRNYIEHFRYYSSFDRSFLGIYSEVFDRFFTYDLKYRKNVPTILYNILLQHFVNVRFEFVSGKKMIGIDKKDRKIAKEKECARITIREKNGVYSEQFTYKLKNGTVYVDARDKRYLQSIIRLLFYPEKVNMDEMIEVKEKKKPSDNNTGKGYSKRDRQQDRKEYDKYKEKKKKEGNFLSGMGGNINWDEINAQLKN

SEQ ID NO: 120 - protein, 1385 aa, Clostridium aminophilum
MKFSKVDHTRSAVGIQKATDSVHGMLYTDPKKQEVNDLDKRFDQLNVKAKRLYNVFNQSKAEEDDDEKRFGKVVKKLNRELKDLLFHREVSRYNSIGNAKYNYYGIKSNPEEIVSNLGMVESLKGERDPQKVISKLLLYYLRKGLKPGTDGLRMILEASCGLRKLSGDEKELKVFLQTLDEDFEKKTFKKNLIRSIENQNMAVQPSNEGDPIIGITQGRFNSQKNEEKSAIERMMSMYADLNEDHREDVLRKLRRLNVLYFNVDTEKTEEPTLPGEVDTNPVFEVWHDHEKGKENDRQFATFAKILTEDRETRKKEKLAVKEALNDLKSAIRDHNIMAYRCSIKVTEQDKDGLFFEDQRINRFWIHHIESAVERILASINPEKLYKLRIGYLGEKVWKDLLNYLSIKYIAVGKAVFHFAMEDLGKTGQDIELGKLSNSVSGGLTSFDYEQIRADETLQRQLSVEVAFAANNLFRAVVGQTGKKIEQSKSEENEEDFLLWKAEKIAESIKKEGEGNTLKSILQFFGGASSWDLNHFCAAYGNESSALGYETKFADDLRKAIYSLRNETFHFTTLNKGSFDWNAKLIGDMFSHEAATGIAVERTRFYSNNLPMFYRESDLKRIMDHLYNTYHPRASQVPSFNSVFVRKNFRLFLSNTLNTNTSFDTEVYQKWESGVYYLFKEIYYNSFLPSGDAHHLFFEGLRRIRKEADNLPIVGKEAKKRNAVQDFGRRCDELKNLSLSAICQMIMTEYNEQNNGNRKVKSTREDKRKPDIFQHYKMLLLRTLQEAFAIYIRREEFKFIFDLPKTLYVMKPVEEFLPNWKSGMFDSLVERVKQSPDLQRWYVLCKFLNGRLLNQLSGVIRSYIQFAGDIQRRAKANHNRLYMDNTQRVEYYSNVLEVVDFCIKGTSRFSNVFSDYFRDEDAYADYLDNYLQFKDEKIAEVSSFAALKTFCNEEEVKAGIYMDGENPVMQRNIVMAKLFGPDEVLKNVVPKVTREEIEEYYQLEKQIAPYRQNGYCKSEEDQKKLLRFQRIKNRVEFQTITEFSEIINELLGQLISWSFLRERDLLYFQLGFHYLCLHNDTEKPAEYKEISREDGTVIRNAILHQVAAMYVGGLPVYTLADKKLAAFEKGEADCKLSISKDTAGAGKKIKDFFRYSKYVLIKDRMLTDQNQKYTIYLAGLELFENTDEHDNITDVRKYVDHFKYYATSDENAMSILDLYSEIHDRFFTYDMKYQKNVANMLENILLRHFVLIRPEFFTGSKKVGEGKKITCKARAQIEIAENGMRSEDFTYKLSDGKKNISTCMIAARDQKYLNTVARLLYYPHEAKKSIVDTREKKNNKKTNRGDGTFNKQKGTARKEKDNGPREFNDTGFSNTPFAGFDPFRNS

SEQ ID NO: 121 - protein, 1175 aa, Carnobacterium gallinarum
MRITKVKIKLDNKLYQVTMQKEEKYGTLKLNEESRKSTAEILRLKKASFNKSFHSKTINSQKENKNATIKKNGDYISQIFEKLVGVDTNKNIRKPKMSLTDLKDLPKKDLALFIKRKFKNDDIVEIKNLDLISLFYNALQKVPGEHFTDESWADFCQEMMPYREYKNKFIERKIILLANSIEQNKGFSINPETFSKRKRVLHQWAIEVQERGDFSILDEKLSKLAEIYNFKKMCKRVQDELNDLEKSMKKGKNPEKEKEAYKKQKNFKIKTIWKDYPYKTHIGLIEKIKENEELNQFNIEIGKYFEHYFPIKKERCTEDEPYYLNSETIATTVNYQLKNALISYLMQIGKYKQFGLENQVLDSKKLQEIGIYEGFQTKFMDACVFATSSLKNIIEPMRSGDILGKREFKEAIATSSFVNYHHFFPYFPFELKGMKDRESELIPFGEQTEAKQMQNIWALRGSVQQIRNEIFHSFDKNQKFNLPQLDKSNFEFDASENSTGKSQSYIETDYKFLFEAEKNQLEQFFIERIKSSGALEYYPLKSLEKLFAKKEMKFSLGSQVVAFAPSYKKLVKKGHSYQTATEGTANYLGLSYYNRYELKEESFQAQYYLLKLIYQYVFLPNFSQGNSPAFRETVKAILRINKDEARKKMKKNKKFLRKYAFEQVREMEFKETPDQYMSYLQSEMREEKVRKAEKNDKGFEKNITMNFEKLLMQIFVKGFDVFLTTFAGKELLLSSEEKVIKETEISLSKKINEREKTLKASIQVEHQLVATNSAISYWLFCKLLDSRHLNELRNEMIKFKQSRIKFNHTQHAELIQNLLPIVELTILSNDYDEKNDSQNVDVSAYFEDKSLYETAPYVQTDDRTRVSFRPILKLEKYHTKSLIEALLKDNPQFRVAATDIQEWMHKREEIGELVEKRKNLHTEWAEGQQTLGAEKREEYRDYCKKIDRFNWKANKVTLTYLSQLHYLITDLLGRMVGFSALFERDLVYFSRSFSELGGETYHISDYKNLSGVLRLNAEVKPIKIKNIKVIDNEENPYKGNEPEVKPFLDRLHAYLENVIGIKAVHGKIRNQTAHLSVLQLELSMIESMNNLRDLMAYDRKLKNAVTKSMIKILDKHGMILKLKIDENHKNFEIESLIPKEIIHLKDKAIKTNQVSEEYCQLVLALLTTNPGNQLN

SEQ ID NO: 122 - protein, 1164 aa, Carnobacterium gallinarum
MRMTKVKINGSPVSMNRSKLNGHLVWNGTTNTVNILTKKEQSFAASFLNKTLVKADQVKGYKVLAENIFIIFEQLEKSNSEKPSVYLNNIRRLKEAGLKRFFKSKYHEEIKYTSEKNQSVPTKLNLIPLFFNAVDRIQEDKFDEKNWSYFCKEMSPYLDYKKSYLNRKKEILANSIQQNRGFSMPTAEEPNLLSKRKQLFQQWAMKFQESPLIQQNNFAVEQFNKEFANKINELAAVYNVDELCTAITEKLMNFDKDKSNKTRNFEIKKLWKQHPHNKDKALIKLFNQEGNEALNQFNIELGKYFEHYFPKTGKKESAESYYLNPQTIIKTVGYQLRNAFVQYLLQVGKLHQYNKGVLDSQTLQEIGMYEGFQTKFMDACVFASSSLRNIIQATTNEDILTREKFKKELEKNVELKHDLFFKTEIVEERDENPAKKIAMTPNELDLWAIRGAVQRVRNQIFHQQINKRHEPNQLKVGSFENGDLGNVSYQKTIYQKLFDAEIKDIEIYFAEKIKSSGALEQYSMKDLEKLFSNKELTLSLGGQVVAFAPSYKKLYKQGYFYQNEKTIELEQFTDYDFSNDVFKANYYLIKLIYHYVFLPQFSQANNKLFKDTVHYVIQQNKELNTTEKDKKNNKKIRKYAFEQVKLMKNESPEKYMQYLQREMQEERTIKEAKKTNEEKPNYNFEKLLIQIFIKGFDTFLRNFDLNLNPAEELVGTVKEKAEGLRKRKERIAKILNVDEQIKTGDEEIAFWIFAKLLDARHLSELRNEMIKFKQSSVKKGLIKNGDLIEQMQPILELCILSNDSESMEKESFDKIEVFLEKVELAKNEPYMQEDKLTPVKFRFMKQLEKYQTRNFIENLVIENPEFKVSEKIVLNWHEEKEKIADLVDKRTKLHEEWASKAREIEEYNEKIKKNKSKKLDKPAEFAKFAEYKIICEAIENFNRLDHKVRLTYLKNLHYLMIDLMGRMVGFSVLFERDFVYMGRSYSALKKQSIYLNDYDTFANIRDWEVNENKHLFGTSSSDLTFQETAEFKNLKKPMENQLKALLGVTNHSFEIRNNIAHLHVLRNDGKGEGVSLLSCMNDLRKLMSYDRKLKNAVTKAIIKILDKHGMILKLTNNDHTKPFEIESLKPKKIIHLEKSNHSFPMDQVSQEYCDLVKKMLVFTN

SEQ ID NO: 123 - protein, 1154 aa, Paludibacter propionicigenes
MRVSKVKVKDGGKDKMVLVHRKTTGAQLVYSGQPVSNETSNILPEKKRQSFDLSTLNKTIIKFDTAKKQKLNVDQYKIVEKIFKYPKQELPKQIKAEEILPFLNHKFQEPVKYWKNGKEESFNLTLLIVEAVQAQDKRKLQPYYDWKTWYIQTKSDLLKKSIENNRIDLTENLSKRKKALLAWETEFTASGSIDLTHYHKVYMTDVLCKMLQDVKPLTDDKGKINTNAYHRGLKKALQNHQPAIFGTREVPNEANRADNQLSIYHLEVVKYLEHYFPIKTSKRRNTADDIAHYLKAQTLKTTIEKQLVNAIRANIIQQGKTNHHELKADTTSNDLIRIKTNEAFVLNLTGTCAFAANNIRNMVDNEQTNDILGKGDFIKSLLKDNTNSQLYSFFFGEGLSTNKAEKETQLWGIRGAVQQIRNNVNHYKKDALKTVFNISNFENPTITDPKQQTNYADTIYKARFINELEKIPEAFAQQLKTGGAVSYYTIENLKSLLTTFQFSLCRSTIPFAPGFKKVFNGGINYQNAKQDESFYELMLEQYLRKENFAEESYNARYFMLKLIYNNLFLPGFTTDRKAFADSVGFVQMQNKKQAEKVNPRKKEAYAFEAVRPMTAADSIADYMAYVQSELMQEQNKKEEKVAEETRINFEKFVLQVFIKGFDSFLRAKEFDFVQMPQPQLTATASNQQKADKLNQLEASITADCKLTPQYAKADDATHIAFYVFCKLLDAAHLSNLRNELIKFRESVNEFKFHHLLEIIEICLLSADVVPTDYRDLYSSEADCLARLRPFIEQGADITNWSDLFVQSDKHSPVIHANIELSVKYGTTKLLEQIINKDTQFKTTEANFTAWNTAQKSIEQLIKQREDHHEQWVKAKNADDKEKQERKREKSNFAQKFIEKHGDDYLDICDYINTYNWLDNKMHFVHLNRLHGLTIELLGRMAGFVALFDRDFQFFDEQQIADEFKLHGFVNLHSIDKKLNEVPTKKIKEIYDIRNKIIQINGNKINESVRANLIQFISSKRNYYNNAFLHVSNDEIKEKQMYDIRNHIAHFNYLTKDAADFSLIDLINELRELLHYDRKLKNAVSKAFIDLFDKHGMILKLKLNADHKLKVESLEPKKIYHLGSSAKDKPEYQYCTNQVMMAYCNMCRSLLEMKK

SEQ ID NO: 124 - protein, 970 aa, Unknown
  Description of Unknown: Listeria weihenstephanensis sequence
MLALLHQEVPSQKLHNLKSLNTESLTKLFKPKFQNMISYPPSKGAEHVQFCLTDIAVPAIRDLDEIKPDWGIFFEKLKPYTDWAESYIHYKQTTIQKSIEQNKIQSPDSPRKLVLQKYVTAFLNGEPLGLDLVAKKYKLADLAESFKVVDLNEDKSANYKIKACLQQHQRNILDELKEDPELNQYGIEVKKYIQRYFPIKRAPNRSKHARADFLKKELIESTVEQQFKNAVYHYVLEQGKMEAYELTDPKTKDLQDIRSGEAFSFKFINACAFASNNLKMILNPECEKDILGKGDFKKNLPNSTTQSDVVKKMIPFFSDEIQNVNFDEAIWAIRGSIQQIRNEVYHCKKHSWKSILKIKGFEFEPNNMKYTDSDMQKLMDKDIAKIPDFIEEKLKSSGIIRFYSHDKLQSIWEMKQGFSLLTTNAPFVPSFKRVYAKGHDYQTSKNRYYDLGLTTFDILEYGEEDFRARYFLTKLVYYQQFMPWFTADNNAFRDAANFVLRLNKNRQQDAKAFINIREVEEGEMPRDYMGYVQGQIAIHEDSTEDTPNHFEKFISQVFIKGFDSHMRSADLKFIKNPRNQGLEQSEIEEMSFDIKVEPSFLKNKDDYIAFWTFCKMLDARHLSELRNEMIKYDGHLTGEQEIIGLALLGVDSRENDWKQFFSSEREYEKIMKGYVGEELYQREPYRQSDGKTPILFRGVEQARKYGTETVIQRLFDASPEFKVSKCNITEWERQKETIEETIERRKELHNEWEKNPKKPQNNAFFKEYKECCDAIDAYNWHKNKTTLVYVNELHHLLIEILGRYVGYVAIADRDFQCMANQYFKHSGITERVEYWGDNRLKSIKKLDTFLKKEGLFVSEKNARNHIAHLNYLSLKSECTLLYLSERLREIFKYDRKLKNAVSKSLIDILDRHGMSVVFANLKENKHRLVIKSLEPKKLRHLGEKKIDNGYIETNQVSEEYCGIVKRLLEI

SEQ ID NO: 125 - protein, 1051 aa, Unknown
  Description of Unknown: Listeria newyorkensis sequence
MKITKMRVDGRTIVMERTSKEGQLGYEGIDGNKTTEIIFDKKKESFYKSILNKTVRKPDEKEKNRRKQAINKAINKEITELMLAVLHQEVPSQKLHNLKSLNTESLTKLFKPKFQNMISYPPSKGAEHVQFCLTDIAVPAIRDLDEIKPDWGIFFEKLKPYTDWAESYIHYKQTTIQKSIEQNKIQSPDSPRKLVLQKYVTAFLNGEPLGLDLVAKKYKLADLAESFKLVDLNEDKSANYKIKACLQQHQRNILDELKEDPELNQYGIEVKKYIQRYFPIKRAPNRSKHARADFLKKELIESTVEQQFKNAVYHYVLEQGKMEAYELTDPKTKDLQDIRSGEAFSFKFINACAFASNNLKMILNPECEKDILGKGNFKKNLPNSTTRSDVVKKMIPFFSDELQNVNFDEAIWAIRGSIQQIRNEVYHCKKHSWKSILKIKGFEFEPNNMKYADSDMQKLMDKDIAKIPEFIEEKLKSSGVVRFYRHDELQSIWEMKQGFSLLTTNAPFVPSFKRVYAKGHDYQTSKNRYYNLDLTTFDILEYGEEDFRARYFLTKLVYYQQFMPWFTADNNAFRDAANFVLRLNKNRQQDAKAFINIREVEEGEMPRDYMGYVQGQIAIHEDSIEDTPNHFEKFISQVFIKGFDRHMRSANLKFIKNPRNQGLEQSEIEEMSFDIKVEPSFLKNKDDYIAFWIFCKMLDARHLSELRNEMIKYDGHLTGEQEIIGLALLGVDSRENDWKQFFSSEREYEKIMKGYVVEELYQREPYRQSDGKTPILFRGVEQARKYGTETVIQRLFDANPEFKVSKCNLAEWERQKETIEETIKRRKELHNEWAKNPKKPQNNAFFKEYKECCDAIDAYNWHKNKTTLAYVNELHHLLIEILGRYVGYVAIADRDFQCMANQYFKHSGITERVEYWGDNRLKSIKKLDTFLKKEGLFVSEKNARNHIAHLNYLSLKSECTLLYLSERLREIFKYDRKLKNAVSKSLIDILDRHGMSVVFANLKENKHRLVIKSLEPKKLRHLGGKKIDGGYIETNQVSEEYCGIVKRLLEM

SEQ ID NO: 126 - protein, 1152 aa, Leptotrichia wadei; identical to SEQ ID NO: 116

SEQ ID NO: 127 - protein, 1285 aa, Rhodobacter capsulatus
MQIGKVQGRTISEFGDPAGGLKRKISTDGKNRKELPAHLSSDPKALIGQWISGIDKIYRKPDSRKSDGKAIHSPTPSKMQFDARDDLGEAFWKLVSEAGLAQDSDYDQFKRRLHPYGDKFQPADSGAKLKFEADPPEPQAFHGRWYGAMSKRGNDAKELAAALYEHLHVDEKRIDGQPKRNPKTDKFAPGLVVARALGIESSVLPRGMARLARNWGEEEIQTYFVVDVAASVKEVAKAAVSAAQAFDPPRQVSGRSLSPKVGFALAEHLERVTGSKRCSFDPAAGPSVLALHDEVKKTYKRLCARGKNAARAFPADKTELLALMRHTHENRVRNQMVRMGRVSEYRGQQAGDLAQSHYWTSAGQTEIKESEIFVRLWVGAFALAGRSMKAWIDPMGKIVNTEKNDRDLTAAVNIRQVISNKEMVAEAMARRGIYFGETPELDRLGAEGNEGFVFALLRYLRGCRNQTFHLGARAGFLKEIRKELEKTRWGKAKEAEHVVLTDKTVAAIRAIIDNDAKALGARLLADLSGAFVAHYASKEHFSTLYSEIVKAVKDAPEVSSGLPRLKLLLKRADGVRGYVHGLRDTRKHAFATKLPPPPAPRELDDPATKARYIALLRLYDGPFRAYASGITGTALAGPAARAKEAATALAQSVNVTKAYSDVMEGRTSRLRPPNDGETLREYLSALTGETATEFRVQIGYESDSENARKQAEFIENYRRDMLAFMFEDYIRAKGFDWILKIEPGATAMTRAPVLPEPIDTRGQYEHWQAALYLVMHFVPASDVSNLLHQLRKWEALQGKYELVQDGDATDQADARREALDLVKRFRDVLVLFLKTGEARFEGRAAPFDLKPFRALFANPATFDRLFMATPTTARPAEDDPEGDGASEPELRVARTLRGLRQIARYNHMAVLSDLFAKHKVRDEEVARLAEIEDETQEKSQIVAAQELRTDLHDKVMKCHPKTISPEERQSYAAAIKTIEEHRFLVGRVYLGDHLRLHRLMMDVIGRLIDYAGAYERDTGTFLINASKQLGAGADWAVTIAGAANTDARTQTRKDLAHFNVLDRADGTPDLTALVNRAREMMAYDRKRKNAVPRSILDMLARLGLTLKWQMKDHLLQDATITQAAIKHLDKVRLTVGGPAAVTEARFSQDYLQMVAAVFNGSVQNPKPRRRDDGDAWHKPPKPATAQSQPDQKPPNKAPSAGSRLPPPQVGEVYEGVVVKVIDTGSLGFLAVEGVAGNIGLHISRLRRIREDAIIVGRRYRFRVEIYVPPKSNTSKLNAADLVRID

SEQ ID NO: 128 - protein, 1285 aa, Rhodobacter capsulatus
MQIGKVQGRTISEFGDPAGGLKRKISTDGKNRKELPAHLSSDPKALIGQWISGIDKIYRKPDSRKSDGKAIHSPTPSKMQFDARDDLGEAFWKLVSEAGLAQDSDYDQFKRRLHPYGDKFQPADSGAKLKFEADPPEPQAFHGRWYGAMSKRGNDAKELAAALYEHLHVDEKRIDGQPKRNPKTDKFAPGLVVARALGIESSVLPRGMARLARNWGEEEIQTYFVVDVAASVKEVAKAAVSAAQAFDPPRQVSGRSLSPKVGFALAEHLERVTGSKRCSFDPAAGPSVLALHDEVKKTYKRLCARGKNAARAFPADKTELLALMRHTHENRVRNQMVRMGRVSEYRGQQAGDLAQSHYWTSAGQTEIKESEIFVRLWVGAFALAGRSMKAWIDPMGKIVNTEKNDRDLTAAVNIRQVISNKEMVAEAMARRGIYFGETPELDRLGAEGNEGFVFALLRYLRGCRNQTFHLGARAGFLKEIRKELEKTRWGKAKEAEHVVLTDKTVAAIRAIIDNDAKALGARLLADLSGAFVAHYASKEHFSTLYSEIVKAVKDAPEVSSGLPRLKLLLKRADGVRGYVHGLRDTRKHAFATKLPPPPAPRELDDPATKARYIALLRLYDGPFRAYASGITGTALAGPAARAKEAATALAQSVNVTKAYSDVMEGRSSRLRPPNDGETLREYLSALTGETATEFRVQIGYESDSENARKQAEFIENYRRDMLAFMFEDYIRAKGFDWILKIEPGATAMTRAPVLPEPIDTRGQYEHWQAALYLVMHFVPASDVSNLLHQLRKWEALQGKYELVQDGDATDQADARREALDLVKRFRDVLVLFLKTGEARFEGRAAPFDLKPFRALFANPATFDRLFMATPTTARPAEDDPEGDGASEPELRVARTLRGLRQIARYNHMAVLSDLFAKHKVRDEEVARLAEIEDETQEKSQIVAAQELRTDLHDKVMKCHPKTISPEERQSYAAAIKTIEEHRFLVGRVYLGDHLRLHRLMMDVIGRLIDYAGAYERDTGTFLINASKQLGAGADWAVTIAGAANTDARTQTRKDLAHFNVLDRADGTPDLTALVNRAREMMAYDRKRKNAVPRSILDMLARLGLTLKWQMKDHLLQDATITQAAIKHLDKVRLTVGGPAAVTEARFSQDYLQMVAAVFNGSVQNPKPRRRDDGDAWHKPPKPATAQSQPDQKPPNKAPSAGSRLPPPQVGEVYEGVVVKVIDTGSLGFLAVEGVAGNIGLHISRLRRIREDAIIVGRRYRFRVEIYVPPKSNTSKLNAADLVRID

SEQ ID NO: 129 - protein, 1285 aa, Rhodobacter capsulatus; identical to SEQ ID NO: 128

SEQ ID NO: 130 - protein, 1159 aa, Leptotrichia buccalis
MKVTKVGGISHKKYTSEGRLVKSESEENRTDERLSALLNMRLDMYIKNPSSTETKENQKRIGKLKKFFSNKMVYLKDNTLSLKNGKKENIDREYSETDILESDVRDKKNFAVLKKIYLNENVNSEELEVFRNDIKKKLNKINSLKYSFEKNKANYQKINENNIEKVEGKSKRNIIYDYYRESAKRDAYVSNVKEAFDKLYKEEDIAKLVLEIENLTKLEKYKIREFYHEIIGRKNDKENFAKIIYEEIQNVNNMKELIEKVPDMSELKKSQVFYKYYLDKEELNDKNIKYAFCHFVEIEMSQLLKNYVYKRLSNISNDKIKRIFEYQNLKKLIENKLLNKLDTYVRNCGKYNYYLQDGEIATSDFIARNRQNEAFLRNIIGVSSVAYFSLRNILETENENDITGRMRGKTVKNNKGEEKYVSGEVDKIYNENKKNEVKENLKMFYSYDFNMDNKNEIEDFFANIDEAISSIRHGIVHFNLELEGKDIFAFKNIAPSEISKKMFQNEINEKKLKLKIFRQLNSANVFRYLEKYKILNYLKRTRFEFVNKNIPFVPSFTKLYSRIDDLKNSLGIYWKTPKTNDDNKTKEIIDAQIYLLKNIYYGEFLNYFMSNNGNFFEISKEIIELNKNDKRNLKTGFYKLQKFEDIQEKIPKEYLANIQSLYMINAGNQDEEEKDTYIDFIQKIFLKGFMTYLANNGRLSLIYIGSDEETNTSLAEKKQEFDKFLKKYEQNNNIKIPYEINEFLREIKLGNILKYTERLNMFYLILKLLNHKELTNLKGSLEKYQSANKEEAFSDQLELINLLNLDNNRVTEDFELEADEIGKFLDFNGNKVKDNKELKKFDTNKIYFDGENIIKHRAFYNIKKYGMLNLLEKIADKAGYKISIEELKKYSNKKNEIEKNHKMQENLHRKYARPRKDEKFTDEDYESYKQAIENIEEYTHLKNKVEFNELNLLQGLLLRILHRLVGYTSIWERDLRFRLKGEFPENQYIEEIFNFENKKNVKYKGGQIVEKYIKFYKELHQNDEVKINKYSSANIKVLKQEKKDLYIRNYIAHFNYIPHAEISLLEVLENLRKLLSYDRKLKNAVMKSVVDILKEYGFVATFKIGADKKIGIQTLESEKIVHLKNLKKKKLMTDRNSEELCKLVKIMFEYKMEEKKSEN

SEQ ID NO: 131 - protein, 1285 aa, Rhodobacter capsulatus; identical to SEQ ID NO: 128

SEQ ID NO: 132 - protein, 1344 aa, Eubacterium rectale
MLRRDKEVKKLYNVFNQIQVGTKPKKWNNDEKLSPEENERRAQQKNIKMKNYKWREACSKYVESSQRIINDVIFYSYRKAKNKLRYMRKNEDILKKMQEAEKLSKFSGGKLEDFVAYTLRKSLVVSKYDTQEFDSLAAMVVFLECIGKNNISDHEREIVCKLLELIRKDFSKLDPNVKGSQGANIVRSVRNQNMIVQPQGDRFLFPQVYAKENETVTNKNVEKEGLNEFLLNYANLDDEKRAESLRKLRRILDVYFSAPNHYEKDMDITLSDNIEKEKFNVWEKHECGKKETGLFVDIPDVLMEAEAENIKLDAVVEKRERKVLNDRVRKQNIICYRYTRAVVEKYNSNEPLFFENNAINQYWIHHIENAVERILKNCKAGKLFKLRKGYLAEKVWKDAINLISIKYIALGKAVYNFALDDIWKDKKNKELGIVDERIRNGITSFDYEMIKAHENLQRELAVDIAFSVNNLARAVCDMSNLGNKESDFLLWKRNDIADKLKNKDDMASVSAVLQFFGGKSSWDINIFKDAYKGKKKYNYEVRFIDDLRKAIYCARNENFHFKTALVNDEKWNTELFGKIFERETEFCLNVEKDRFYSNNLYMFYQVSELRNMLDHLYSRSVSRAAQVPSYNSVIVRTAFPEYITNVLGYQKPSYDADTLGKWYSACYYLLKEIYYNSFLQSDRALQLFEKSVKTLSWDDKKQQRAVDNFKDHFSDIKSACTSLAQVCQIYMTEYNQQNNQIKKVRSSNDSIFDQPVYQHYKVLLKKAIANAFADYLKNNKDLFGFIGKPFKANEIREIDKEQFLPDWTSRKYEALCIEVSGSQELQKWYIVGKFLNARSLNLMVGSMRSYIQYVTDIKRRAASIGNELHVSVHDVEKVEKWVQVIEVCSLLASRTSNQFEDYFNDKDDYARYLKSYVDFSNVDMPSEYSALVDFSNEEQSDLYVDPKNPKVNRNIVHSKLFAADHILRDIVEPVSKDNIEEFYSQKAEIAYCKIKGKEITAEEQKAVLKYQKLKNRVELRDIVEYGEIINELLGQLINWSFMRERDLLYFQLGFHYDCLRNDSKKPEGYKNIKVDENSIKDAILYQIIGMYVNGVTVYAPEKDGDKLKEQCVKGGVGVKVSAFHRYSKYLGLNEKTLYNAGLEIFEVVAEHEDIINLRNGIDHFKYYLGDYRSMLSIYSEVFDRFFTYDIKYQKNVLNLLQNILLRHNVIVEPILESGFKTIGEQTKPGAKLSIRSIKSDTFQYKVKGGTLITDAKDERYLETIRKILYYAENEEDNLKKSVVVTNADKYEKNKESDDQNKQKEKKNKDNKGKKNEETKSDAEKNNNERLSYNPFANLNFKLSN

SEQ ID NO: 133 - protein, 1285 aa, Unknown
  Description of Unknown: Herbinix hemicellulosilytica sequence
MKLTRRRISGNSVDQKITAAFYRDMSQGLLYYDSEDNDCTDKVIESMDFERSWRGRILKNGEDDKNPFYMFVKGLVGSNDKIVCEPIDVDSDPDNLDILINKNLTGFGRNLKAPDSNDTLENLIRKIQAGIPEEEVLPELKKIKEMIQKDIVNRKEQLLKSIKNNRIPFSLEGSKLVPSTKKMKWLFKLIDVPNKTFNEKMLEKYWEIYDYDKLKANITNRLDKTDKKARSISRAVSEELREYHKNLRTNYNRFVSGDRPAAGLDNGGSAKYNPDKEEFLLFLKEVEQYFKKYFPVKSKHSNKSKDKSLVDKYKNYCSYKVVKKEVNRSIINQLVAGLIQQGKLLYYFYYNDTWQEDFLNSYGLSYIQVEEAFKKSVMTSLSWGINRLTSFFIDDSNTVKFDDITTKKAKEAIESNYFNKLRTCSRMQDHFKEKLAFFYPVYVKDKKDRPDDDIENLIVLVKNAIESVSYLRNRTFHFKESSLLELLKELDDKNSGQNKIDYSVAAEFIKRDIENLYDVFREQIRSLGIAEYYKADMISDCFKTCGLEFALYSPKNSLMPAFKNVYKRGANLNKAYIRDKGPKETGDQGQNSYKALEEYRELTWYIEVKNNDQSYNAYKNLLQLIYYHAFLPEVRENEALITDFINRTKEWNRKETEERLNTKNNKKHKNFDENDDITVNTYRYESIPDYQGESLDDYLKVLQRKQMARAKEVNEKEEGNNNYIQFIRDVVVWAFGAYLENKLKNYKNELQPPLSKENIGLNDTLKELFPEEKVKSPFNIKCRFSISTFIDNKGKSTDNTSAEAVKTDGKEDEKDKKNIKRKDLLCFYLFLRLLDENEICKLQHQFIKYRCSLKERRFPGNRTKLEKETELLAELEELMELVRFTMPSIPEISAKAESGYDTMIKKYFKDFIEKKVFKNPKTSNLYYHSDSKTPVTRKYMALLMRSAPLHLYKDIFKGYYLITKKECLEYIKLSNIIKDYQNSLNELHEQLERIKLKSEKQNGKDSLYLDKKDFYKVKEYVENLEQVARYKHLQHKINFESLYRIFRIHVDIAARMVGYTQDWERDMHFLFKALVYNGVLEERRFEAIFNNNDDNNDGRIVKKIQNNLNNKNRELVSMLCWNKKLNKNEFGAIIWKRNPIAHLNHFTQTEQNSKSSLESLINSLRILLAYDRKRQNAVTKTINDLLLNDYHIRIKWEGRVDEGQIYFNIKEKEDIENEPIIHLKHLHKKDCYIYKNSYMFDKQKEWICNGIKEEVYDKSILKCIGNLFKFDYEDKNKSSANPKHT

SEQ ID NO: 134 - protein, 954 aa, Eubacterium siraeum
MGKKIHARDLREQRKTDRTEKFADQNKKREAERAVPKKDAAVSVKSVSSVSSKKDNVTKSMAKAAGVKSVFAVGNTVYMTSFGRGNDAVLEQKIVDTSHEPLNIDDPAYQLNVVTMNGYSVTGHRGETVSAVTDNPLRRFNGRKKDEPEQSVPTDMLCLKPTLEKKFFGKEFDDNIHIQLIYNILDIEKILAVYSTNAIYALNNMSADENIENSDFFMKRTTDETFDDFEKKKESTNSREKADFDAFEKFIGNYRLAYFADAFYVNKKNPKGKAKNVLREDKELYSVLTLIGKLAHWCVASEEGRAEFWLYKLDELKDDFKNVLDVVYNRPVEEINNRFIENNKVNIQILGSVYKNTDIAELVRSYYEFLITKKYKNMGFSIKKLRESMLEGKGYADKEYDSVRNKLYQMTDFILYTGYINEDSDRADDLVNTLRSSLKEDDKTTVYCKEADYLWKKYRESIREVADALDGDNIKKLSKSNIEIQEDKLRKCFISYADSVSEFTKLIYLLTRFLSGKEINDLVTTLINKFDNIRSFLEIMDELGLDRTFTAEYSFFEGSTKYLAELVELNSFVKSCSFDINAKRTMYRDALDILGIESDKTEEDIEKMIDNILQIDANGDKKLKKNNGLRNFIASNVIDSNRFKYLVRYGNPKKIRETAKCKPAVRFVLNEIPDAQIERYYEACCPKNTALCSANKRREKLADMIAEIKFENFSDAGNYQKANVTSRTSEAEIKRKNQAIIRLYLTVMYIMLKNLVNVNARYVIAFHCVERDTKLYAESGLEVGNIEKNKTNLTMAVMGVKLENGIIKTEFDKSFAENAANRYLRNARWYKLILDNLKKSERAVVNEFANTVCALNAIRNININIKEIKEVENYFALYHYLIQKHLENRFADKKVERDTGDFISKLEEHKTYCKDFVKAYCTPFGYNLVRYKNLTIDGLFDKNYPGKDDSDEQK

SEQ ID NO: 135 - protein, 930 aa, Ruminococcus sp.
MAKKNKMKPRELREAQKKARQLKAAEINNNAAPAIAAMPAAEVIAPVAEKKKSSVKAAGMKSILVSENKMYITSFGKGNSAVLEYEVDNNDYNKTQLSSKDNSNIELGDVNEVNITFSSKHGFGSGVEINTSNPTHRSGESSPVRGDMLGLKSELEKRFFGKTFDDNIHIQLIYNILDIEKILAVYVTNIVYALNNMLGIKDSESYDDFMGYLSARNTYEVFTHPDKSNLSDKVKGNIKKSLSKFNDLLKTKRLGYFGLEEPKTKDTRASEAYKKRVYHMLAIVGQIAQCVFHDKSGAKRFDLYSFINNIDPEYRDTLDYLVEERLKSINKDFIEGNKVNISLLIDMMKGYEADDIIRLYYDFIVLKSQKNLGFSIKKLREKMLEEYGFRFKDKQYDSVRSKMYKLMDFLLFCNYYRNDVAAGEALVRKLRFSMTDDEKEGIYADEAAKLWGKFRNDFENIADHMNGDVIKELGKADMDFDEKILDSEKKNASDLLYFSKMIYMLTYFLDGKEINDLLTTLISKFDNIKEFLKIMKSSAVDVECELTAGYKLFNDSQRITNELFIVKNIASMRKPAASAKLTMFRDALTILGIDDNITDDRISEILKLKEKGKGIHGLRNFITNNVIESSRFVYLIKYANAQKIREVAKNEKVVMFVLGGIPDTQIERYYKSCVEFPDMNSSLEAKRSELARMIKNISFDDFKNVKQQAKGRENVAKERAKAVIGLYLTVMYLLVKNLVNVNARYVIAIHCLERDFGLYKEIIPELASKNLKNDYRILSQTLCELCDDRNESSNLFLKKNKRLRKCVEVDINNADSSMTRKYANCIAHLTVVRELKEYIGDIRTVDSYFSIYHYVMQRCITKRGDDTKQEEKIKYEDDLLKNHGYTKDFVKALNSPFGYNIPRFKNLSIEQLFDRNEYLTEKLEHHHHHH

SEQ ID NO: 136 - protein, 1228 aa, Unknown
  Lachnospiraceae bacterium
MSKLEKFTNCYSLSKTLRFKAIPVGKTQENIDNKRLLVEDEKRAEDYKGVKKLLDRYYLSFINDVLHSIKLKNLNNYISLFRKKTRTEKENKELENLEINLRKEIAKAFKGNEGYKSLFKKDIIETILPEFLDDKDEIALVNSFNGFTTAFTGFFDNRENMFSEEAKSTSIAFRCINENLTRYISNMDIFEKVDAIFDKHEVQEIKEKILNSDYDVEDFFEGEFFNFVLTQEGIDVYNAIIGGFVTESGEKIKGLNEYINLYNQKTKQKLPKFKPLYKQVLSDRESLSFYGEGYTSDEEVLEVFRNTLNKNSEIFSSIKKLEKLFKNFDEYSSAGIFVKNGPAISTISKDIFGEWNVIRDKWNAEYDDIHLKKKAVVTEKYEDDRRKSFKKIGSFSLEQLQEYADADLSVVEKLKEIIIQKVDEIYKVYGSSEKLFDADFVLEKSLKKNDAVVAIMKDLLDSVKSFENYIKAFFGEGKETNRDESFYGDFVLAYDILLKVDHIYDAIRNYVTQKPYSKDKFKLYFQNPQFMGGWDKDKETDYRATILRYGSKYYLAIMDKKYAKCLQKIDKDDVNGNYEKINYKLLPGPNKMLPKVFFSKKWMAYYNPSEDIQKIYKNGTFKKGDMFNLNDCHKLIDFFKDSISRYPKWSNAYDFNFSETEKYKDIAGFYREVEEQGYKVSFESASKKEVDKLVEEGKLYMFQIYNKDFSDKSHGTPNLHTMYFKLLFDENNHGQIRLSGGAELFMRRASLKKEELVVHPANSPIANKNPDNPKKTTTLSYDVYKDKRFSEDQYELHIPIAINKCPKNIFKINTEVRVLLKHDDNPYVIGIDRGERNLLYIVVVDGKGNIVEQYSLNEIINNFNGIRIKTDYHSLLDKKEKERFEARQNWTSIENIKELKAGYISQVVHKICELVEKYDAVIALEDLNSGFKNSRVKVEKQVYQKFEKMLIDKLNYMVDKKSNPCATGGALKGYQITNKFESFKSMSTQNGFIFYIPAWLTSKIDPSTGFVNLLKTKYTSIADSKKFISSFDRIMYVPEEDLFEFALDYKNFSRTDADYIKKWKLYSYGNRIRIFRNPKKNNVFDWEEVCLTSAYKELFNKYGINYQQGDIRALLCEQSDKAFYSSFMALMSLMLQMRNSITGRTDVDFLISPVKNSDGIFYDSRNYEAQENAILPKNADANGAYNIARKVLWAIGQFKKAEDEKLDKVKIAISNKEWLEYAQTSVKH

SEQ ID NO: 137 - protein, 1307 aa, Acidaminococcus sp.
MTQFEGFTNLYQVSKTLRFELIPQGKTLKHIQEQGFIEEDKARNDHYKELKPIIDRIYKTYADQCLQLVQLDWENLSAAIDSYRKEKTEETRNALIEEQATYRNAIHDYFIGRTDNLTDAINKRHAEIYKGLFKAELFNGKVLKQLGTVTTTEHENALLRSFDKFTTYFSGFYENRKNVFSAEDISTAIPHRIVQDNFPKFKENCHIFTRLITAVPSLREHFENVKKAIGIFVSTSIEEVFSFPFYNQLLTQTQIDLYNQLLGGISREAGTEKIKGLNEVLNLAIQKNDETAHIIASLPHRFIPLFKQILSDRNTLSFILEEFKSDEEVIQSFCKYKTLLRNENVLETAEALFNELNSIDLTHIFISHKKLETISSALCDHWDTLRNALYERRISELTGKITKSAKEKVQRSLKHEDINLQEIISAAGKELSEAFKQKTSEILSHAHAALDQPLPTTLKKQEEKEILKSQLDSLLGLYHLLDWFAVDESNEVDPEFSARLTGIKLEMEPSLSFYNKARNYATKKPYSVEKFKLNFQMPTLASGWDVNKEKNNGAILFVKNGLYYLGIMPKQKGRYKALSFEPTEKTSEGFDKMYYDYFPDAAKMIPKCSTQLKAVTAHFQTHTTPILLSNNFIEPLEITKEIYDLNNPEKEPKKFQTAYAKKTGDQKGYREALCKWIDFTRDFLSKYTKTTSIDLSSLRPSSQYKDLGEYYAELNPLLYHISFQRIAEKEIMDAVETGKLYLFQIYNKDFAKGHHGKPNLHTLYWTGLFSPENLAKTSIKLNGQAELFYRPKSRMKRMAHRLGEKMLNKKLKDQKTPIPDTLYQELYDYVNHRLSHDLSDEARALLPNVITKEVSHEIIKDRRFTSDKFFFHVPITLNYQAANSPSKFNQRVNAYLKEHPETPIIGIDRGERNLIYITVIDSTGKILEQRSLNTIQQFDYQKKLDNREKERVAARQAWSVVGTIKDLKQGYLSQVIHEIVDLMIHYQAVVVLENLNFGFKSKRTGIAEKAVYQQFEKMLIDKLNCLVLKDYPAEKVGGVLNPYQLTDQFTSFAKMGTQSGFLFYVPAPYTSKIDPLTGFVDPFVWKTIKNHESRKHFLEGFDFLHYDVKTGDFILHFKMNRNLSFQRGLPGFMPAWDIVFEKNETQFDAKGTPFIAGKRIVPVIENHRFTGRYRDLYPANELIALLEEKGIVFRDGSNILPKLLENDDSHAIDTMVALIRSVLQMRNSNAATGEDYINSPVRDLNGVCFDSRFQNPEWPMDADANGAYHIALKGQLLLNHLKESKDLKLQNGISNQDWLAYIQELRN

SEQ ID NO: 138 - protein, 1300 aa, Francisella novicida
MSIYQEFVNKYSLSKTLRFELIPQGKTLENIKARGLILDDEKRAKDYKKAKQIIDKYHQFFIEEILSSVCISEDLLQNYSDVYFKLKKSDDDNLQKDFKSAKDTIKKQISEYIKDSEKFKNLFNQNLIDAKKGQESDLILWLKQSKDNGIELFKANSDITDIDEALEIIKSFKGWTTYFKGFHENRKNVYSSNDIPTSIIYRIVDDNLPKFLENKAKYESLKDKAPEAINYEQIKKDLAEELTFDIDYKTSEVNQRVFSLDEVFEIANFNNYLNQSGITKFNTIIGGKFVNGENTKRKGINEYINLYSQQINDKTLKKYKMSVLFKQILSDTESKSFVIDKLEDDSDVVTTMQSFYEQIAAFKTVEEKSIKETLSLLFDDLKAQKLDLSKIYFKNDKSLTDLSQQVFDDYSVIGTAVLEYITQQIAPKNLDNPSKKEQELIAKKTEKAKYLSLETIKLALEEFNKHRDIDKQCRFEEILANFAAIPMIFDEIAQNKDNLAQISIKYQNQGKKDLLQASAEDDVKAIKDLLDQTNNLLHKLKIFHISQSEDKANILDKDEHFYLVFEECYFELANIVPLYNKIRNYITQKPYSDEKFKLNFENSTLANGWDKNKEPDNTAILFIKDDKYYLGVMNKKNNKIFDDKAIKENKGEGYKKIVYKLLPGANKMLPKVFFSAKSIKFYNPSEDILRIRNHSTHTKNGSPQKGYEKFEFNIEDCRKFIDFYKQSISKHPEWKDFGFRFSDTQRYNSIDEFYREVENQGYKLTFENISESYIDSVVNQGKLYLFQIYNKDFSAYSKGRPNLHTLYWKALFDERNLQDVVYKLNGEAELFYRKQSIPKKITHPAKEAIANKNKDNPKKESVFEYDLIKDKRFTEDKFFFHCPITINFKSSGANKFNDEINLLLKEKANDVHILSIDRGERHLAYYTLVDGKGNIIKQDTFNIIGNDRMKTNYHDKLAAIEKDRDSARKDWKKINNIKEMKEGYLSQVVHEIAKLVIEYNAIVVFEDLNFGFKRGRFKVEKQVYQKLEKMLIEKLNYLVFKDNEFDKTGGVLRAYQLTAPFETFKKMGKQTGIIYYVPAGFTSKICPVTGFVNQLYPKYESVSKSQEFFSKFDKICYNLDKGYFEFSFDYKNFGDKAAKGKWTIASFGSRLINFRNSDKNHNWDTREVYPTKELEKLLKDYSIEYGHGECIKAAICGESDKKFFAKLTSVLNTILQMRNSKTGTELDYLISPVADVNGNFFDSRQAPKNMPQDADANGAYHIGLKGLMLLGRIKNNQEGKKLNLVIKNEEYFEFVQNRNN

SEQ ID NO: 139 - protein, 1239 aa, Porphyromonas macacae
MKTQHFFEDFTSLYSLSKTIRFELKPIGKTLENIKKNGLIRRDEQRLDDYEKLKKVIDEYHEDFIANILSSFSFSEEILQSYIQNLSESEARAKIEKTMRDTLAKAFSEDERYKSIFKKELVKKDIPVWCPAYKSLCKKFDNFTTSLVPFHENRKNLYTSNEITASIPYRIVHVNLPKFIQNIEALCELQKKMGADLYLEMMENLRNVWPSFVKTPDDLCNLKTYNHLMVQSSISEYNRFVGGYSTEDGTKHQGINEWINIYRQRNKEMRLPGLVFLHKQILAKVDSSSFISDTLENDDQVFCVLRQFRKLFWNTVSSKEDDAASLKDLFCGLSGYDPEAIYVSDAHLATISKNIFDRWNYISDAIRRKTEVLMPRKKESVERYAEKISKQIKKRQSYSLAELDDLLAHYSEESLPAGFSLLSYFTSLGGQKYLVSDGEVILYEEGSNIWDEVLIAFRDLQVILDKDFTEKKLGKDEEAVSVIKKALDSALRLRKFFDLLSGTGAEIRRDSSFYALYTDRMDKLKGLLKMYDKVRNYLTKKPYSIEKFKLHFDNPSLLSGWDKNKELNNLSVIFRQNGYYYLGIMTPKGKNLFKTLPKLGAEEMFYEKMEYKQIAEPMLMLPKVFFPKKTKPAFAPDQSVVDIYNKKTFKTGQKGFNKKDLYRLIDFYKEALTVHEWKLFNFSFSPTEQYRNIGEFFDEVREQAYKVSMVNVPASYIDEAVENGKLYLFQIYNKDFSPYSKGIPNLHTLYWKALFSEQNQSRVYKLCGGGELFYRKASLHMQDTTVHPKGISIHKKNLNKKGETSLFNYDLVKDKRFTEDKFFFHVPISINYKNKKITNVNQMVRDYIAQNDDLQIIGIDRGERNLLYISRIDTRGNLLEQFSLNVIESDKGDLRTDYQKILGDREQERLRRRQEWKSIESIKDLKDGYMSQVVHKICNMVVEHKAIVVLENLNLSFMKGRKKVEKSVYEKFERMLVDKLNYLVVDKKNLSNEPGGLYAAYQLTNPLFSFEELHRYPQSGILFFVDPWNTSLTDPSTGFVNLLGRINYTNVGDARKFFDRFNAIRYDGKGNILFDLDLSRFDVRVETQRKLWTLTTFGSRIAKSKKSGKWMVERIENLSLCFLELFEQFNIGYRVEKDLKKAILSQDRKEFYVRLIYLFNLMMQIRNSDGEEDYILSPALNEKNLQFDSRLIEAKDLPVDADANGAYNVARKGLMVVQRIKRGDHESIHRIGRAQWLRY

SEQ ID NO: 140 - protein, 1373 aa, Moraxella bovoculi
MLFQDFTHLYPLSKTVRFELKPIDRTLEHIHAKNFLSQDETMADMHQKVKVILDDYHRDFIADMMGEVKLTKLAEFYDVYLKFRKNPKDDELQKQLKDLQAVLRKEIVKPIGNGGKYKAGYDRLFGAKLFKDGKELGDLAKFVIAQEGESSPKLAHLAHFEKFSTYFTGFHDNRKNMYSDEDKHTAIAYRLIHENLPRFIDNLQILTTIKQKHSALYDQIINELTASGLDVSLASHLDGYHKLLTQEGITAYNTLLGGISGEAGSPKIQGINELINSHHNQHCHKSERIAKLRPLHKQILSDGMSVSFLPSKFADDSEMCQAVNEFYRHYADVFAKVQSLFDGFDDHQKDGIYVEHKNLNELSKQAFGDFALLGRVLDGYYVDVVNPEFNERFAKAKTDNAKAKLTKEKDKFIKGVHSLASLEQAIEHYTARHDDESVQAGKLGQYFKHGLAGVDNPIQKIHNNHSTIKGFLERERPAGERALPKIKSGKNPEMTQLRQLKELLDNALNVAHFAKLLTTKTTLDNQDGNFYGEFGVLYDELAKIPTLYNKVRDYLSQKPFSTEKYKLNFGNPTLLNGWDLNKEKDNFGVILQKDGCYYLALLDKAHKKVFDNAPNTGKSIYQKMIYKYLEVRKQFPKVFFSKEAIAINYHPSKELVEIKDKGRQRSDDERLKLYRFILECLKIHPKYDKKFEGAIGDIQLFKKDKKGREVPISEKDLFDKINGIFSSKPKLEMEDFFIGEFKRYNPSQDLVDQYNIYKKIDSNDNRKKENFYNNHPKFKKDLVRYYYESMCKHEEWEESFEFSKKLQDIGCYVDVNELFTEIETRRLNYKISFCNINADYIDELVEQGQLYLFQIYNKDFSPKAHGKPNLHTLYFKALFSEDNLADPIYKLNGEAQIFYRKASLDMNETTIHRAGEVLENKNPDNPKKRQFVYDIIKDKRYTQDKFMLHVPITMNFGVQGMTIKEFNKKVNQSIQQYDEVNVIGIDRGERHLLYLTVINSKGEILEQCSLNDITTASANGTQMTTPYHKILDKREIERLNARVGWGEIETIKELKSGYLSHVVHQISQLMLKYNAIVVLEDLNFGFKRGRFKVEKQIYQNFENALIKKLNHLVLKDKADDEIGSYKNALQLTNNFTDLKSIGKQTGFLFYVPAWNTSKIDPETGFVDLLKPRYENIAQSQAFFGKFDKICYNADKDYFEFHIDYAKFTDKAKNSRQIWTICSHGDKRYVYDKTANQNKGAAKGINVNDELKSLFARHHINEKQPNLVMDICQNNDKEFHKSLMYLLKTLLALRYSNASSDEDFILSPVANDEGVFFNSALADDTQPQNADANGAYHIALKGLWLLNELKNSDDLNKVKLAIDNQTWLNFAQNR

SEQ ID NO: 141 - protein, 1306 aa, Thiomicrospira sp.
MGIHGVPAATKTFDSEFFNLYSLQKTVRFELKPVGETASFVEDFKNEGLKRVVSEDERRAVDYQKVKEIIDDYHRDFIEESLNYFPEQVSKDALEQAFHLYQKLKAAKVEEREKALKEWEALQKKLREKVVKCFSDSNKARFSRIDKKELIKEDLINWLVAQNREDDIPTVETFNNFTTYFTGFHENRKNIYSKDDHATAISFRLIHENLPKFFDNVISFNKLKEGFPELKFDKVKEDLEVDYDLKHAFEIEYFVNFVTQAGIDQYNYLLGGKTLEDGTKKQGMNEQINLFKQQQTRDKARQIPKLIPLFKQILSERTESQSFIPKQFESDQELFDSLQKLHNNCQDKFTVLQQAILGLAEADLKKVFIKTSDLNALSNTIFGNYSVFSDALNLYKESLKTKKAQEAFEKLPAHSIHDLIQYLEQFNSSLDAEKQQSTDTVLNYFIKTDELYSRFIKSTSEAFTQVQPLFELEALSSKRRPPESEDEGAKGQEGFEQIKRIKAYLDTLMEAVHFAKPLYLVKGRKMIEGLDKDQSFYEAFEMAYQELESLIIPIYNKARSYLSRKPFKADKFKINFDNNTLLSGWDANKETANASILFKKDGLYYLGIMPKGKTFLFDYFVSSEDSEKLKQRRQKTAEEALAQDGESYFEKIRYKLLPGASKMLPKVFFSNKNIGFYNPSDDILRIRNTASHTKNGTPQKGHSKVEFNLNDCHKMIDFFKSSIQKHPEWGSFGFTFSDTSDFEDMSAFYREVENQGYVISFDKIKETYIQSQVEQGNLYLFQIYNKDFSPYSKGKPNLHTLYWKALFEEANLNNVVAKLNGEAEIFFRRHSIKASDKVVHPANQAIDNKNPHTEKTQSTFEYDLVKDKRYTQDKFFFHVPISLNFKAQGVSKFNDKVNGFLKGNPDVNIIGIDRGERHLLYFTVVNQKGEILVQESLNTLMSDKGHVNDYQQKLDKKEQERDAARKSWTTVENIKELKEGYLSHVVHKLAHLIIKYNAIVCLEDLNFGFKRGRFKVEKQVYQKFEKALIDKLNYLVFKEKELGEVGHYLTAYQLTAPFESFKKLGKQSGILFYVPADYTSKIDPTTGFVNFLDLRYQSVEKAKQLLSDFNAIRFNSVQNYFEFEIDYKKLTPKRKVGTQSKWVICTYGDVRYQNRRNQKGHWETEEVNVTEKLKALFASDSKTTTVIDYANDDNLIDVILEQDKASFFKELLWLLKLTMTLRHSKIKSEDDFILSPVKNEQGEFYDSRKAGEVWPKDADANGAYHIALKGLWNLQQINQWEKGKTLNLAIKNQDWFSFIQEKPYQE

SEQ ID NO: 142 - protein, 1214 aa, Butyrivibrio sp.
MGIHGVPAAYYQNLTKKYPVSKTIRNELIPIGKTLENIRKNNILESDVKRKQDYEHVKGIMDEYHKQLINEALDNYMLPSLNQAAEIYLKKHVDVEDREEFKKTQDLLRREVTGRLKEHENYTKIGKKDILDLLEKLPSISEEDYNALESFRNFYTYFTSYNKVRENLYSDEEKSSTVAYRLINENLPKFLDNIKSYAFVKAAGVLADCIEEEEQDALFMVETFNMTLTQEGIDMYNYQIGKVNSAINLYNQKNHKVEEFKKIPKMKVLYKQILSDREEVFIGEFKDDETLLSSIGAYGNVLMTYLKSEKINIFFDALRESEGKNVYVKNDLSKTTMSNIVFGSWSAFDELLNQEYDLANENKKKDDKYFEKRQKELKKNKSYTLEQMSNLSKEDISPIENYIERISEDIEKICIYNGEFEKIVVNEHDSSRKLSKNIKAVKVIKDYLDSIKELEHDIKLINGSGQELEKNLVVYVGQEEALEQLRPVDSLYNLTRNYLTKKPFSTEKVKLNFNKSTLLNGWDKNKETDNLGILFFKDGKYYLGIMNTTANKAFVNPPAAKTENVFKKVDYKLLPGSNKMLPKVFFAKSNIGYYNPSTELYSNYKKGTHKKGPSFSIDDCHNLIDFFKESIKKHEDWSKFGFEFSDTADYRDISEFYREVEKQGYKLTFTDIDESYINDLIEKNELYLFQIYNKDFSEYSKGKLNLHTLYFMMLFDQRNLDNVVYKLNGEAEVFYRPASIAENELVIHKAGEGIKNKNPNRAKVKETSTFSYDIVKDKRYSKYKFTLHIPITMNFGVDEVRRFNDVINNALRTDDNVNVIGIDRGERNLLYVVVINSEGKILEQISLNSIINKEYDIETNYHALLDEREDDRNKARKDWNTIENIKELKTGYLSQVVNVVAKLVLKYNAIICLEDLNFGFKRGRQKVEKQVYQKFEKMLIEKLNYLVIDKSREQVSPEKMGGALNALQLTSKFKSFAELGKQSGIIYYVPAYLTSKIDPTTGFVNLFYIKYENIEKAKQFFDGFDFIRFNKKDDMFEFSFDYKSFTQKACGIRSKWIVYTNGERIIKYPNPEKNNLFDEKVINVTDEIKGLFKQYRIPYENGEDIKEIIISKAEADFYKRLFRLLHQTLQMRNSTSDGTRDYIISPVKNDRGEFFCSEFSEGTMPKDADANGAYNIARKGLWVLEQIRQKDEGEKVNLSMTNAEWLKYAQLHLL

SEQ ID NO: 143 - protein, 1270 aa, Unknown
  Description of Unknown: Brumimicrobium aurantiacum sequence
MKNQINLFTNKFQLSKTLRFELKPQGKTLEHINSKGFIKNDEKRADSYKKMKATIDAFHRDFIDLAMSNVKLTNLIDFEEIYNASNADKKDEKYKTKLSKIQEILRKEIAKGFKGEEVKDIFSKIDKKDLITKLLEEWIIENKIEDIHFDPEFKNFTTYFSGFHQNRKNMYTDQEQSTAIAYRLIHENLPRFIDNINIFQKINKVPDLEENLKKLYQEIEEYLGINAINEAFELEYFNETLSQKGIDIYNLILGGRTAEEGKQKIQGLNEYINLYNQKQDKKNRVPKLKVLYKQILSDRTRTSFLPDTFEDDEESSASQKVLDSINNFYLENLIDYLPNDKNSTINVLENLKLLLAELINFELDKVYIKNDTSITNISMKIFKNYSVIREALNYFYENKIDPNFAHNFNNANTDKKREKLEKEKAKITKQTYLSISFIEEAIHLYINENSNGNQYKNTYKPNCIANYFKDFFIAENKEGSNKEFDFISKIKARYNTIKGVLNTPFPDNKRLHQEKNNIDNIKHFLDSIMEYLHFAKPLVLSGSFAFEKDEQFYTNFDELYNQLELIIPLYNKVRNYATQKPYSTEKFKLNFENSTLLNGWDVNKEEANTSILFIKNGFYYLGIMDKNHNKIFRNTPKSTNTDIYKKVNYKLLPGASKMLPKVFFGKKNLDYYKPSKDILRIRNHGTHTKGGKPQSGFDKLDFNLNDCHKLIDFFKDSIQKHPDWSKFKFKFSDTQIYESIDQFYRELEPQAYSITYTNIDSSFIEEQINEGKLYLFQIYNKDFSKFSNGKPNLHTLYWKALFDEQNLKDVTYKLNGEAEIFYRKKSIQHDRQIIHKRNQPIINKNPNNEKKESIFKYNIIKDKRYTIDKFQFHVPITLNFKAKGTDYINYDVLDYLKENPDVKIIGLDRGERHLIYLTLIDQKGKILEQISLNEIVNKKHNITTSYHNLLETKEIERDKARKNWGTVETIKELKEGYISQVVHKISKMMIEHNAIVVMEDLNMGFKRGRFKVEKQVYQKLEKMLIDKLNYLVLKDRQPNEPAGIYNALQLTNKFESFQKLGKQSGFLFYVPAWNTSKIDPTTGFVNLFHVKYESVRKSQEFFNKFNSIKYNPKEAIFEFDFDYNEFTTRAEGTKTNWTVCTYGDRIKTFRNPEKLNQWDNKEINITTAFEDFFGRHNITYGNGSDIKSQLISREEKDFFSELIHLFRLTLQMRNSKTNSEIDYLISPVKNENGFFYDSRHADKNLPKDADANGAYHIAKKGLQWIKEIQS

SEQ ID NO: 144 - protein, 1200 aa, Porphyromonas crevioricanis
MDSLKDFTNLYPVSKTLRFELKPVGKTLENIEKAGILKEDEHRAESYRRVKKIIDTYHKVFIDSSLENMAKMGIENEIKAMLQSFCELYKKDHRTEGEDKALDKIRAVLRGLIVGAFTGVCGRRENTVQNEKYESLFKEKLIKEILPDFVLSTEAESLPFSVEEATRSLKEFDSFTSYFAGFYENRKNIYSTKPQSTAIAYRLIHENLPKFIDNILVFQKIKEPIAKELEHIRADFSAGGYIKKDERLEDIFSLNYYIHVLSQAGIEKYNALIGKIVTEGDGEMKGLNEHINLYNQQRGREDRLPLFRPLYKQILSDREQLSYLPESFEKDEELLRALKEFYDHIAEDILGRTQQLMTSISEYDLSRIYVRNDSQLTDISKKMLGDWNAIYMARERAYDHEQAPKRITAKYERDRIKALKGEESISLANLNSCIAFLDNVRDCRVDTYLSTLGQKEGPHGLSNLVENVFASYHEAEQLLSFPYPEENNLIQDKDNVVLIKNLLDNISDLQRFLKPLWGMGDEPDKDERFYGEYNYIRGALDQVIPLYNKVRNYLTRKPYSTRKVKLNFGNSQLLSGWDRNKEKDNSCVILRKGQNFYLAIMNNRHKRSFENKVLPEYKEGEPYFEKMDYKFLPDPNKMLPKVFLSKKGIEIYKPSPKLLEQYGHGTHKKGDTFSMDDLHELIDFFKHSIEAHEDWKQFGFKFSDTATYENVSSFYREVEDQGYKLSFRKVSESYVYSLIDQGKLYLFQIYNKDFSPCSKGTPNLHTLYWRMLFDERNLADVIYKLDGKAEIFFREKSLKNDHPTHPAGKPIKKKSRQKKGEESLFEYDLVKDRRYTMDKFQFHVPITMNFKCSAGSKVNDMVNAHIREAKDMHVIGIDRGERNLLYICVIDSRGTILDQISLNTINDIDYHDLLESRDKDRQQERRNWQTIEGIKELKQGYLSQAVHRIAELMVAYKAVVALEDLNMGFKRGRQKVESSVYQQFEKQLIDKLNYLVDKKKRPEDIGGLLRAYQFTAPFKSFKEMGKQNGFLFYIPAWNTSNIDPTTGFVNLFHAQYENVDKAKSFFQKFDSISYNPKKDWFEFAFDYKNFTKKAEGSRSMWILCTHGSRIKNFRNSQKNGQWDSEEFALTEAFKSLFVRYEIDYTADLKTAIVDEKQKDFFVDLLKLFKLTVQMRNSWKEKDLDYLISPVAGADGRFFDT

SEQ ID NO: 145 - protein, 1300 aa, Francisella tularensis
MSIYQEFVNKYSLSKTLRFELIPQGKTLENIKARGLILDDEKRAKDYKKAKQIIDKYHQFFIEEILSSVCISEDLLQNYSDVYFKLKKSDDDNLQKDFKSAKDTIKKQISKYINDSEKFKNLFNQNLIDAKKGQESDLILWLKQSKDNGIELFKANSDITDIDEALEIIKSFKGWTTYFKGFHENRKNVYSSNDIPTSIIYRIVDDNLPKFLENKAKYESLKDKAPEAINYEQIKKDLAEELTFDIDYKTSEVNQRVFSLDEVFEIANFNNYLNQSGITKFNTIIGGKFVNGENTKRKGINEYINLYSQQINDKTLKKYKMSVLFKQILSDTESKSFVIDKLEDDSDVVTTMQSFYEQIAAFKTVEEKSIKETLSLLFDDLKAQKLDLSKIYFKNDKSLTDLSQQVFDDYSVISTAVLEYITQQVAPKNLDNPSKKEQELIAKKTEKAKYLSLETIKLALEEFNKHRDIDKQCRFEEILANFAAIPMIFDEIAQNKDNLAQISIKYQNQGKKDLLQASAEDDVKAIKDLLDQTNNLLHRLKIFHISQSEDKANILDKDEHFYLVFEECYFELANIVPLYNKIRNYITQKPYSDEKFKLNFENSTLANGWDKNKEPDNTAILFIKDDKYYLGVMNKKNNKIFDDKAIKENKGEGYKKIVYKLLPGANKMLPKVFFSAKSIKFYNPSEDILRIRNHSTHTKNGSPQKGYEKFEFNIEDCRKFIDFYKQSISKHPEWKDFGFRFSDTQRYNSIDEFYREVENQGYKLTFENISESYIDSVVNQGKLYLFQIYNKDFSAYSKGRPNLHTLYWKALFDERNLQDVVYKLNGEAELFYRKQSIPKKITHPAKETIANKNKDNPKKESVFEYDLIKDKRFTEDKFFFHCPITINFKSSGANKFNDEINLLLKEKANDVHILSIDRGERHLAYYTLVDGKGNIIKQDTFNIIGNDRMKTNYHDKLAAIEKDRDSARKDWKKINNIKEMKEGYLSQVVHEIAKLVIEHNAIVVFEDLNFGFKRGRFKVEKQVYQKLEKMLIEKLNYLVFKDNEFDKTGGVLRAYQLTAPFETFKKMGKQTGIIYYVPAGFTSKICPVTGFVNQLYPKYESVSKSQEFFSKFDKICYNLDKGYFEFSFDYKNFGDKAAKGKWTIASFGSRLINFRNSDKNHNWDTREVYPTKELEKLLKDYSIEYGHGECIKAAICGESDKKFFAKLTSVLNTILQMRNSKTGTELDYLISPVADVNGNFFDSRQAPKNMPQDADANGAYHIGLKGLMLLDRIKNNQEGKKLNLVIKNEEYFEFVQNRNN

SEQ ID NO: 146 - protein, 1259 aa, Eubacterium ventriosum
MESNNKIFTETIGTSSIAKTMRNSLVPTESTKRNIEKNGIIIDDQLRAEKRQQLKEIMDEYYRAYIDSKLSNVALTRTIDWKELFQAIENNYKQNTTKTKNELEKKQKEKRTEIYKILSDDEEFKQLFNAKLLTNILPEFIKNQNIDNEEKQEKISTVELFQRFTSSFTDFFKNRKNVFSKDEISTSICYRVVQENAWIFYQNLLAFEEIKKTAEQEIKKIEAENRDSISDYSLKEIFDFDFYGLLLNQGGIRFYNDVCGKINYHMNLYGQKHNIKSNKFKMKRMHKQILSIDESTFEVPTMFENDKEVYQVLNEFLSDLASKKILERVEKIGENVSEYEINKIYIQSKNFENFSSFMCGNWQIINDSLKTYYNEKIKSKGKAKVEKVKKAIKAIEYKSLADINQLVERYNHDELNRKAEEYISAINEKIKDLYVNEIEFDEKTNLIENETKSEEIKSKLDSIMEIMHWTKMFIIEEEIEKDVNFYNEIEEIYDELQPLVTIYNRIRNYVTQKPYSEEKIKLNFGIPTLANGWSKTKEYDNNAIIMIRDGKYYLGIFNAKNKPDKKIMEGHQSEENGDYKKMIYRLLPGPNKMLPKVFMSKTGIAEYKPSQYILECYEQNKHIKSDKNFDIKFCRDLIDFFKTSINRHPEWSKFNFKFSETSEYEDISTFYREVEKQGYKIEWTYISEKEIKELDENGQLYLFQIYNKDFSEKSKGKENLHTMYLKNLFSEENLKNIVLKLNGEAEVFFRKSSIKKPIIHKKGSVLVNKTYNENGERKSIPEEQYTEIYKYLNSIGTNELSEKSKKLMEEGKVEYYKANYDIVKDYRYSVDKFFIHLPMTINFKAAGFSPINNIALKSIALKEDMHIIGIDRGERNLIYVSVIDTKGNIVEQRNFNIVNGIDYKEKLKQKELDRDNARKNWKEIGKIKDLKEGYLSLVVHEIAKLVVKYNAIITMEDLNQGFKRGRFKVERQVYQKFETMLINKLNYLVDKDLAVDQEGGLLRGYQLTYIPESLKVLGRQCGYIFYVPAAYTSKIDPTTGFVAIFNYKGMTDKDFVTSFDSIKYDDERGLFAFEFDYENFVTHKVEMARNKWTVYTYGERIKRKFKNGLWDTAEKVDLTYQMRSILEKYEIEYNKGQDILEQIEELDEKAQNGICKEIKYLVKDIVQMRNSLPDNAVEDYDAIISPVINNNGEFFDSTRGDEDKPLDADANGAYCIALKGLYEVMQIKKNWNEETEFPRKELKIRHQDWFDFIQNKRYL

SEQ ID NO: 147 - protein, 1129 aa, Alicyclobacillus acidoterrestris
MAVKSIKVKLRLDDMPEIRAGLWKLHKEVNAGVRYYTEWLSLLRQENLYRRSPNGDGEQECDKTAEECKAELLERLRARQVENGHRGPAGSDDELLQLARQLYELLVPQAIGAKGDAQQIARKFLSPLADKDAVGGLGIAKAGNKPRWVRMREAGEPGWEEEKEKAETRKSADRTADVLRALADFGLKPLMRVYTDSEMSSVEWKPLRKGQAVRTWDRDMFQQAIERMMSWESWNQRVGQEYAKLVEQKNRFEQKNFVGQEHLVHLVNQLQQDMKEASPGLESKEQTAHYVTGRALRGSDKVFEKWGKLAPDAPFDLYDAEIKNVQRRNTRRFGSHDLFAKLAEPEYQALWREDASFLTRYAVYNSILRKLNHAKMFATFTLPDATAHPIWTRFDKLGGNLHQYTFLFNEFGERRHAIRFHKLLKVENGVAREVDDVTVPISMSEQLDNLLPRDPNEPIALYFRDYGAEQHFTGEFGGAKIQCRRDQLAHMHRRRGARDVYLNVSVRVQSQSEARGERRPPYAAVFRLVGDNHRAFVHFDKLSDYLAEHPDDGKLGSEGLLSGLRVMSVDLGLRTSASISVFRVARKDELKPNSKGRVPFFFPIKGNDNLVAVHERSQLLKLPGETESKDLRAIREERQRTLRQLRTQLAYLRLLVRCGSEDVGRRERSWAKLIEQPVDAANHMTPDWREAFENELQKLKSLHGICSDKEWMDAVYESVRRVWRHMGKQVRDWRKDVRSGERPKIRGYAKDVVGGNSIEQIEYLERQYKFLKSWSFFGKVSGQVIRAEKGSRFAITLREHIDHAKEDRLKKLADRIIMEALGYVYALDERGKGKWVAKYPPCQLILLEELSEYQFNNDRPPSENNQLMQWSHRGVFQELINQAQVHDLLVGTMYAAFSSRFDARTGAPGIRCRRVPARCTQEHNPEPFPWWLNKFVVEHTLDACPLRADDLIPTGEGEIFVSPFSAEEGDFHQIHADLNAAQNLQQRLWSDFDISQIRLRCDWGEVDGELVLIPRLTGKRTADSYSNKVFYTNTGVTYYERERGKKRRKVFAQEKLSEEEAELLVEADEAREKSVVLMRDPSGIINRGNWTRQKEFWSMVNQRIEGYLVKQIRSRVPLQDSACENTGDI

SEQ ID NO: 148 - protein, 1147 aa, Alicyclobacillus kakegawensis
MAVKSIKVKLRLSECPDILAGMWQLHRATNAGVRYYTEWVSLMRQEILYSRGPDGGQQCYMTAEDCQRELLRRLRNRQLHNGRQDQPGTDADLLAISRRLYEILVLQSIGKRGDAQQIASSFLSPLVDPNSKGGRGEAKSGRKPAWQKMRDQGDPRWVAAREKYEQRKAVDPSKEILNSLDALGLRPLFAVFTETYRSGVDWKPLGKSQGVRTWDRDMFQQALERLMSWESWNRRVGEEYARLFQQKMKFEQEHFAEQSHLVKLARALEADMRAASQGFEAKRGTAHQITRRALRGADRVFEIWKSIPEEALFSQYDEVIRQVQAEKRRDFGSHDLFAKLAEPKYQPLWRADETFLTRYALYNGVLRDLEKARQFATFTLPDACVNPIWTRFESSQGSNLHKYEFLFDHLGPGRHAVRFQRLLVVESEGAKERDSVVVPVAPSGQLDKLVLREEEKSSVALHLHDTARPDGFMAEWAGAKLQYERSTLARKARRDKQGMRSWRRQPSMLMSAAQMLEDAKQAGDVYLNISVRVKSPSEVRGQRRPPYAALFRIDDKQRRVTVNYNKLSAYLEEHPDKQIPGAPGLLSGLRVMSVDLGLRTSASISVFRVAKKEEVEALGDGRPPHYYPIHGTDDLVAVHERSHLIQMPGETETKQLRKLREERQAVLRPLFAQLALLRLLVRCGAADERIRTRSWQRLTKQGREFTKRLTPSWREALELELTRLEAYCGRVPDDEWSRIVDRTVIALWRRMGKQVRDWRKQVKSGAKVKVKGYQLDVVGGNSLAQIDYLEQQYKFLRRWSFFARASGLVVRADRESHFAVALRQHIENAKRDRLKKLADRILMEALGYVYEASGPREGQWTAQHPPCQLIILEELSAYRFSDDRPPSENSKLMAWGHRGILEELVNQAQVHDVLVGTVYAAFSSRFDARTGAPGVRCRRVPARFVGATVDDSLPLWLTEFLDKHRLDKNLLRPDDVIPTGEGEFLVSPCGEEAARVRQVHADINAAQNLQRRLWQNFDITELRLRCDVKMGGEGTVLVPRVNNARAKQLFGKKVLVSQDGVTFFERSQTGGKPHSEKQTDLTDKELELIAEADEARAKSVVLFRDPSGHIGKGHWIRQREFWSLVKQRIESHTAERIRVRGVGSSLD

SEQ ID NO: 149 - protein, 1144 aa, Alicyclobacillus macrosporangiidus
MAVKSIKVKLMLGHLPEIREGLWHLHEAVNLGVRYYTEWLALLRQGNLYRRGKDGAQECYMTAEQCRQELLVRLRDRQKRNGHTGDPGTDEELLGVARRLYELLVPQSVGKKGQAQMLASGFLSPLADPKSEGGKGTSKSGRKPAWMGMKEAGDSRWVEAKARYEANKAKDPTKQVIASLEMYGLRPLFDVFTETYKTIRWMPLGKHQGVRAWDRDMFQQSLERLMSWESWNERVGAEFARLVDRRDRFREKHFTGQEHLVALAQRLEQEMKEASPGFESKSSQAHRITKRALRGADGIIDDWLKLSEGEPVDRFDEILRKRQAQNPRRFGSHDLFLKLAEPVFQPLWREDPSFLSRWASYNEVLNKLEDAKQFATFTLPSPCSNPVWARFENAEGTNIFKYDFLFDHFGKGRHGVRFQRMIVMRDGVPTEVEGIVVPIAPSRQLDALAPNDAASPIDVFVGDPAAPGAFRGQFGGAKIQYRRSALVRKGRREEKAYLCGFRLPSQRRTGTPADDAGEVFLNLSLRVESQSEQAGRRNPPYAAVFHISDQTRRVIVRYGEIERYLAEHPDTGIPGSRGLTSGLRVMSVDLGLRTSAAISVFRVAHRDELTPDAHGRQPFFFPIHGMDHLVALHERSHLIRLPGETESKKVRSIREQRLDRLNRLRSQMASLRLLVRTGVLDEQKRDRNWERLQSSMERGGERMPSDWWDLFQAQVRYLAQHRDASGEAWGRMVQAAVRTLWRQLAKQVRDWRKEVRRNADKVKIRGIARDVPGGHSLAQLDYLERQYRFLRSWSAFSVQAGQVVRAERDSRFAVALREHIDNGKKDRLKKLADRILMEALGYVYVTDGRRAGQWQAVYPPCQLVLLEELSEYRFSNDRPPSENSQLMVWSHRGVLEELIHQAQVHDVLVGTIPAAFSSRFDARTGAPGIRCRRVPSIPLKDAPSIPIWLSHYLKQTERDAAALRPGELIPTGDGEFLVTPAGRGASGVRVVHADINAAHNLQRRLWENFDLSDIRVRCDRREGKDGTVVLIPRLTNQRVKERYSGVIFTSEDGVSFTVGDAKTRRRSSASQGEGDDLSDEEQELLAEADDARERSVVLFRDPSGFVNGGRWTAQRAFWGMVHNRIETLLAERFSVSGAAEKVRG

SEQ ID NO: 150 - protein, 1115 aa, Alicyclobacillus hesperidum
MTVRSIRVKLAVGSPQYRDVRRGLWKTHEIMNQGVRYYCEWLVLMRQEPIYDEDEHGLTVVQRTREDIQAELLSRLRTLQSAHQHSGDMGTDEELLSLMRQLYEQLVPSSVDKNKSGDARMIARNFFNPLTNPNSQGGLGISNAGRKPKWLLKKLSGDPTWEEDYKKAMEQKQESSVSFLLLELRRFGLHPIFLPYTDTVLEVSWAPKKARQWVRKWDYDLFQQSIERMLSWESWTRRVKERFEKLVESEKKFYDENFATDPEFIKLAETLEGELQASSQGFVAVDEHAFQIRPRSMRGFDRVADEWCKLADDAPIEEYEAAIKRVQARLGRNFGSYVLFAHLAKPEYWSLWRSDPTKILRFARLRALQRAVARAKRHARLTLPDAIHHPIWIRYDAKGKNIYSYRLLIPEKRSKRYYVEFSSLIMPDGENRWAEHRNIRVPLAFSRQWERLHFSIMEDGSLCVQYRDPGVDEPLRAELGGAKIQFDRRYLIRRSSTLSAGECGPVYLNVSVDVNPAHRPDVQVLQSAKLVSVSRDTNRIYLRPENLSAYWKSQGDGTLPLRVMSVDLGVRSSAAVVICRLEHRDSVVSSGRRTATIYRIAGTDEFVAVQERAFLLRLPGEGKGTNEDAPLRDVYAQLGTIRQGIQILRSLLRLCDTKTPDERQEALHGLAQSLEPSGAWKDELHPHLVMLQGVVHDSVDNWKQKVISVHRQMERILGHAVREWKVARKNAGKPPIRRGAGGLSLRRIRQLEQERRTLVAWSNHAREPGQVVRIKRGTQVAQWLVERVNHLKEDRLKKLADLLIMTALGYVYDETKPSGHKWDKRYPPCQIILMEDLSRYRFQSDRPPSENSQLMAWSHRRLLEILKLQADLHKLIVGTVFPAFSSRFDAQSGAPGVRCRSVKKQDIENAAQGKGWLARELQRLNWTLEWLQPNDLIPTGDGELFVTPACCDRQKGIKIVHADLNAAQNLQRRFWGGHAESLCRVTCDVVERDGRRYAVPRISNAFADSFYKVFGQGVFVSTDEEDVYRWMVGEKISSRGRSRGRTSDEEAEAETWIDEAREQQGKVIALFRDASGQIHGGDWLVAKVFWGWVERLVTARLLSRMSEREAAAHKE

SEQ ID NO: 151 - protein, 1076 aa, Sulfobacillus thermotolerans
MSARNIKVKIDTKGNPELRLGLWKTHQVTNEGVKYYTEWLIKLRQQDIYRQSREDASPRVIISASDLKADLLCHARQLQKERLPRITGSDAEILGTLRQVYELIVPSSVGKSGDSKTLARKFLSPLTDPGSAGGRDQSASGRKPTWMKMKSEGNPRWEETFRKWKDRKDNDPTPLVLNQIADYGLLPLIPLFTDVGENIFDPKSKSQFVRTWDRSMFQQAIERLMSWESWNQRVRREWEALNQKHSAFYREQFTADPDAALYRVAQSLEEEMRKEHQGFASDAPEAFRIRRVALKGFDRLLERWQKTLGKNGQSATLLDDIRRVQSDLGDKFGSAPLYQKLLDERWQRLWAVDPTFLQRYAAFNDLTQRLQRAKRVANLTLPDAVAHPIWSRYEGANASSGNRYHIHLPTKGQPGSVTFDRILWPDGNGGWYERKRVTVFLRPSHQVDRIHEAPTDSVVDNFPLVVEDQSARTILRASWGGAKLEYDRNRLPRQLKKGVPDSIYLSLTLNLDTNKPSGLFHTQQNGRVWIRKDVLMQYYNETPGDNVQFKPLYVMSVDLGIRSAAAVSIFSVQLKAGIEEHRLTYPVADCPGLVAVHERSVLLTMPGERREQWDRRYEQQRQGLRELRTDMRGMNDLLRGAYMDGDRREEFLARLSKLEETSPELWGPVYRSLNDSKVASATEWERLVVYCHRQVEQSLSSRIQNLRSGRSAYRMSGGLSLDHVQDLERIRGIIASWTNHPRIPGSVVRWQQGRSHTVALGRHILELKRDRVKKVANYLIMTTLGYAYDSKRARGEKWVRRYPACHLMVFEDLTRYRFRTDRPRSENRQLMRWTHQELIAVTGIQAEPHGISVGTMYAGFSSRFDAVTKAPGVRGATVRQILRTRGMVRLKEIAADVGIDINTLRPHDVLPTGDGEYLLSVVRHGESYRLKQVHADINAAHNLQRRLWTQDEVFRVSCRLALNSGRVVAMPPPSYNKRYGKGFFEKGDNGVYIWKTGGKIKISDTLEEDMDIPEDTAELLRGNSVTLFRDPSGTIAGGNWLEAKEFWGRVNSLVNKGVRDKILGGIPVDNSSAHAE

SEQ ID NO: 152 - protein, 1302 aa, Unknown
  Description of Unknown: Cas12c1
MQTKKTHLHLISAKASRKYRRTIACLSDTAKKDLERRKQSGAADPAQELSCLKTIKFKLEVPEGSKLPSFDRISQIYNALETIEKGSLSYLLFALILSGFRIFPNSSAAKTFASSSCYKNDQFASQIKEIFGEMVKNFIPSELESILKKGRRKNNKDWTEENIKRVLNSEFGRKNSEGSSALFDSFLSKFSQELFRKFDSWNEVNKKYLEAAELLDSMLASYGPFDSVCKMIGDSDSRNSLPDKSTIAFTNNAEITVDIESSVMPYMAIAALLREYRQSKSKAAPVAYVQSHLTTTNGNGLSWFFKFGLDLIRKAPVSSKQSTSDGSKSLQELFSVPDDKLDGLKFIKEACEALPEASLLCGEKGELLGYQDFRTSFAGHIDSWVANYVNRLFELIELVNQLPESIKLPSILTQKNHNLVASLGLQEAEVSHSLELFEGLVKNVRQTLKKLAGIDISSSPNEQDIKEFYAFSDVLNRLGSIRNQIENAVQTAKKDKIDLESAIEWKEWKKLKKLPKLNGLGGGVPKQQELLDKALESVKQIRHYQRIDFERVIQWAVNEHCLETVPKFLVDAEKKKINKESSTDFAAKENAVRFLLEGIGAAARGKTDSVSKAAYNWFVVNNFLAKKDLNRYFINCQGCIYKPPYSKRRSLAFALRSDNKDTIEVVWEKFETFYKEISKEIEKFNIFSQEFQTFLHLENLRMKLLLRRIQKPIPAEIAFFSLPQEYYDSLPPNVAFLALNQEITPSEYITQFNLYSSFLNGNLILLRRSRSYLRAKFSWVGNSKLIYAAKEARLWKIPNAYWKSDEWKMILDSNVLVFDKAGNVLPAPTLKKVCEREGDLRLFYPLLRQLPHDWCYRNPFVKSVGREKNVIEVNKEGEPKVASALPGSLFRLIGPAPFKSLLDDCFFNPLDKDLRECMLIVDQEISQKVEAQKVEASLESCTYSIAVPIRYHLEEPKVSNQFENVLAIDQGEAGLAYAVFSLKSIGEAETKPIAVGTIRIPSIRRLIHSVSTYRKKKQRLQNFKQNYDSTAFIMRENVTGDVCAKIVGLMKEFNAFPVLEYDVKNLESGSRQLSAVYKAVNSHFLYFKEPGRDALRKQLWYGGDSWTIDGIEIVTRERKEDGKEGVEKIVPLKVFPGRSVSARFTSKTCSCCGRNVFDWLFTEKKAKTNKKFNVNSKGELTTADGVIQLFEADRSKGPKFYARRKERTPLTKPIAKGSYSLEEIERRVRTNLRRAPKSKQSRDTSQSQYFCVYKDCALHFSGMQADENAAINIGRRFLTALRKNRRSDFPSNVKISDRLLDN

SEQ ID NO: 153 - protein, 1218 aa, Unknown
  Description of Unknown: Cas12c2
MTKHSIPLHAFRNSGADARKWKGRIALLAKRGKETMRTLQFPLEMSEPEAAAINTTPFAVAYNAIEGTGKGTLFDYWAKLHLAGFRFFPSGGAATIFRQQAVFEDASWNAAFCQQSGKDWPWLVPSKLYERFTKAPREVAKKDGSKKSIEFTQENVANESHVSLVGASITDKTPEDQKEFFLKMAGALAEKFDSWKSANEDRIVAMKVIDEFLKSEGLHLPSLENIAVKCSVETKPDNATVAWHDAPMSGVQNLAIGVFATCASRIDNIYDLNGGKLSKLIQESATTPNVTALSWLFGKGLEYFRTTDIDTIMQDFNIPASAKESIKPLVESAQAIPTMTVLGKKNYAPFRPNFGGKIDSWIANYASRLMLLNDILEQIEPGFELPQALLDNETLMSGIDMTGDELKELIEAVYAWVDAAKQGLATLLGRGGNVDDAVQTFEQFSAMMDTLNGTLNTISARYVRAVEMAGKDEARLEKLIECKFDIPKWCKSVPKLVGISGGLPKVEEEIKVMNAAFKDVRARMFVRFEEIAAYVASKGAGMDVYDALEKRELEQIKKLKSAVPERAHIQAYRAVLHRIGRAVQNCSEKTKQLFSSKVIEMGVFKNPSHLNNFIFNQKGAIYRSPFDRSRHAPYQLHADKLLKNDWLELLAEISATLMASESTEQMEDALRLERTRLQLQLSGLPDWEYPASLAKPDIEVEIQTALKMQLAKDTVTSDVLQRAFNLYSSVLSGLTFKLLRRSFSLKMRFSVADTTQLIYVPKVCDWAIPKQYLQAEGEIGIAARVVTESSPAKMVTEVEMKEPKALGHFMQQAPHDWYFDASLGGTQVAGRIVEKGKEVGKERKLVGYRMRGNSAYKTVLDKSLVGNTELSQCSMIIEIPYTQTVDADFRAQVQAGLPKVSINLPVKETITASNKDEQMLFDRFVAIDLGERGLGYAVFDAKTLELQESGHRPIKAITNLLNRTHHYEQRPNQRQKFQAKFNVNLSELRENTVGDVCHQINRICAYYNAFPVLEYMVPDRLDKQLKSVYESVTNRYIWSSTDAHKSARVQFWLGGETWEHPYLKSAKDKKPLVLSPGRGASGKGTSQTCSCCGRNPFDLIKDMKPRAKIAVVDGKAKLENSELKLFERNLESKDDMLARRHRNERAGMEQPLTPGNYTVDEIKALLRANLRRAPKNRRTKDTTVSEYHCVFSDCGKTMHADENAAVNIGGKFIADIEK

SEQ ID NO: 154 - protein, 1252 aa, Unknown
  Description of Unknown: Cas12c3
MTKLRHRQKKLTHDWAGSKKREVLGSNGKLQNPLLMPVKKGQVTEFRKAFSAYARATKGEMTDGRKNMFTHSFEPFKTKPSLHQCELADKAYQSLHSYLPGSLAHFLLSAHALGFRIFSKSGEATAFQASSKIEAYESKLASELACVDLSIQNLTISTLFNALTTSVRGKGEETSADPLIARFYTLLTGKPLSRDTQGPERDLAEVISRKIASSFGTWKEMTANPLQSLQFFEEELHALDANVSLSPAFDVLIKMNDLQGDLKNRTIVFDPDAPVFEYNAEDPADIIIKLTARYAKEAVIKNQNVGNYVKNAITTTNANGLGWLLNKGLSLLPVSTDDELLEFIGVERSHPSCHALIELIAQLEAPELFEKNVFSDTRSEVQGMIDSAVSNHIARLSSSRNSLSMDSEELERLIKSFQIHTPHCSLFIGAQSLSQQLESLPEALQSGVNSADILLGSTQYMLTNSLVEESIATYQRTLNRINYLSGVAGQINGAIKRKAIDGEKIHLPAAWSELISLPFIGQPVIDVESDLAHLKNQYQTLSNEFDTLISALQKNFDLNFNKALLNRTQHFEAMCRSTKKNALSKPEIVSYRDLLARLTSCLYRGSLVLRRAGIEVLKKHKIFESNSELREHVHERKHFVFVSPLDRKAKKLLRLTDSRPDLLHVIDEILQHDNLENKDRESLWLVRSGYLLAGLPDQLSSSFINLPIITQKGDRRLIDLIQYDQINRDAFVMLVTSAFKSNLSGLQYRANKQSFVVTRTLSPYLGSKLVYVPKDKDWLVPSQMFEGRFADILQSDYMVWKDAGRLCVIDTAKHLSNIKKSVFSSEEVLAFLRELPHRTFIQTEVRGLGVNVDGIAFNNGDIPSLKTFSNCVQVKVSRTNTSLVQTLNRWFEGGKVSPPSIQFERAYYKKDDQIHEDAAKRKIRFQMPATELVHASDDAGWTPSYLLGIDPGEYGMGLSLVSINNGEVLDSGFIHINSLINFASKKSNHQTKVVPRQQYKSPYANYLEQSKDSAAGDIAHILDRLIYKLNALPVFEALSGNSQSAADQVWTKVLSFYTWGDNDAQNSIRKQHWFGASHWDIKGMLRQPPTEKKPKPYIAFPGSQVSSYGNSQRCSCCGRNPIEQLREMAKDTSIKELKIRNSEIQLFDGTIKLFNPDPSTVIERRRHNLGPSRIPVADRTFKNISPSSLEFKELITIVSRSIRHSPEFIAKKRGIGSEYFCAYSDCNSSLNSEANAAANVAQKFQKQLFFEL

SEQ ID NO: 155 - protein, 1125 aa, Unknown
  Description of Unknown: Candidatus Katanobacteria sequence
MRKKLFKGYILHNKRLVYTGKAAIRSIKYPLVAPNKTALNNLSEKIIYDYEHLFGPLNVASYARNSNRYSLVDFWIDSLRAGVIWQSKSTSLIDLISKLEGSKSPSEKIFEQIDFELKNKLDKEQFKDIILLNTGIRSSSNVRSLRGRFLKCFKEEFRDTEEVIACVDKWSKDLIVEGKSILVSKQFLYWEEEFGIKIFPHFKDNHDLPKLTFFVEPSLEFSPHLPLANCLERLKKFDISRESLLGLDNNFSAFSNYFNELFNLLSRGEIKKIVTAVLAVSKSWENEPELEKRLHFLSEKAKLLGYPKLTSSWADYRMIIGGKIKSWHSNYTEQLIKVREDLKKHQIALDKLQEDLKKVVDSSLREQIEAQREALLPLLDTMLKEKDFSDDLELYRFILSDFKSLLNGSYQRYIQTEEERKEDRDVTKKYKDLYSNLRNIPRFFGESKKEQFNKFINKSLPTIDVGLKILEDIRNALETVSVRKPPSITEEYVTKQLEKLSRKYKINAFNSNRFKQITEQVLRKYNNGELPKISEVFYRYPRESHVAIRILPVKISNPRKDISYLLDKYQISPDWKNSNPGEVVDLIEIYKLTLGWLLSCNKDFSMDFSSYDLKLFPEAASLIKNFGSCLSGYYLSKMIFNCITSEIKGMITLYTRDKFVVRYVTQMIGSNQKFPLLCLVGEKQTKNFSRNWGVLIEEKGDLGEEKNQEKCLIFKDKTDFAKAKEVEIFKNNIWRIRTSKYQIQFLNRLFKKTKEWDLMNLVLSEPSLVLEEEWGVSWDKDKLLPLLKKEKSCEERLYYSLPLNLVPATDYKEQSAEIEQRNTYLGLDVGEFGVAYAVVRIVRDRIELLSWGFLKDPALRKIRERVQDMKKKQVMAVFSSSSTAVARVREMAIHSLRNQIHSIALAYKAKIIYEISISNFETGGNRMAKIYRSIKVSDVYRESGADTLVSEMIWGKKNKQMGNHISSYATSYTCCNCARTPFELVIDNDKEYEKGGDEFIFNVGDEKKVRGFLQKSLLGKTIKGKEVLKSIKEYARPPIREVLLEGEDVEQLLKRRGNSYIYRCPFCGYKTDADIQAALNIACRGYISDNAKDAVKEGERKLDYILEVRKLWEKNGAVLRSAKFL

SEQ ID NO: 156 - protein, 1226 aa, Unknown
  Description of Unknown: Candidatus Vogelbacteria sequence
MQKVRKTLSEVHKNPYGTKVRNAKTGYSLQIERLSYTGKEGMRSFKIPLENKNKEVFDEFVKKIRNDYISQVGLLNLSDWYEHYQEKQEHYSLADFWLDSLRAGVIFAHKETEIKNLISKIRGDKSIVDKFNASIKKKHADLYALVDIKALYDFLTSDARRGLKTEEEFFNSKRNTLFPKFRKKDNKAVDLWVKKFIGLDNKDKLNFTKKFIGFDPNPQIKYDHTFFFHQDINFDLERITTPKELISTYKKFLGKNKDLYGSDETTEDQLKMVLGFHNNHGAFSKYFNASLEAFRGRDNSLVEQIINNSPYWNSHRKELEKRIIFLQVQSKKIKETELGKPHEYLASFGGKFESWVSNYLRQEEEVKRQLFGYEENKKGQKKFIVGNKQELDKIIRGTDEYEIKAISKETIGLTQKCLKLLEQLKDSVDDYTLSLYRQLIVELRIRLNVEFQETYPELIGKSEKDKEKDAKNKRADKRYPQIFKDIKLIPNFLGETKQMVYKKFIRSADILYEGINFIDQIDKQITQNLLPCFKNDKERIEFTEKQFETLRRKYYLMNSSRFHHVIEGIINNRKLIEMKKRENSELKTFSDSKFVLSKLFLKKGKKYENEVYYTFYINPKARDQRRIKIVLDINGNNSVGILQDLVQKLKPKWDDIIKKNDMGELIDAIEIEKVRLGILIALYCEHKFKIKKELLSLDLFASAYQYLELEDDPEELSGTNLGRFLQSLVCSEIKGAINKISRTEYIERYTVQPMNTEKNYPLLINKEGKATWHIAAKDDLSKKKGGGTVAMNQKIGKNFFGKQDYKTVFMLQDKRFDLLTSKYHLQFLSKTLDTGGGSWWKNKNIDLNLSSYSFIFEQKVKVEWDLTNLDHPIKIKPSENSDDRRLFVSIPFVIKPKQTKRKDLQTRVNYMGIDIGEYGLAWTIINIDLKNKKINKISKQGFIYEPLTHKVRDYVATIKDNQVRGTFGMPDTKLARLRENAITSLRNQVHDIAMRYDAKPVYEFEISNFETGSNKVKVIYDSVKRADIGRGQNNTEADNTEVNLVWGKTSKQFGSQIGAYATSYICSFCGYSPYYEFENSKSGDEEGARDNLYQMKKLSRPSLEDFLQGNPVYKTFRDFDKYKNDQRLQKTGDKDGEWKTHRGNTAIYACQKCRHISDADIQASYWIALKQVVRDFYKDKEMDGDLIQGDNKDKRKVNELNRLIGVHKDVPIINKNLITSLDINLL

SEQ ID NO: 157 - protein, 1160 aa, Unknown
  Description of Unknown: Candidatus Vogelbacteria sequence
MKAKKSFYNQKRKFGKRGYRLHDERIAYSGGIGSMRSIKYELKDSYGIAGLRNRIADATISDNKWLYGNINLNDYLEWRSSKTDKQIEDGDRESSLLGFWLEALRLGFVFSKQSHAPNDFNETALQDLFETLDDDLKHVLDRKKWCDFIKIGTPKTNDQGRLKKQIKNLLKGNKREEIEKTLNESDDELKEKINRIADVFAKNKSDKYTIFKLDKPNTEKYPRINDVQVAFFCHPDFEEITERDRTKTLDLIINRFNKRYEITENKKDDKTSNRMALYSLNQGYIPRVLNDLFLFVKDNEDDFSQFLSDLENFFSFSNEQIKIIKERLKKLKKYAEPIPGKPQLADKWDDYASDFGGKLESWYSNRIEKLKKIPESVSDLRNNLEKIRNVLKKQNNASKILELSQKIIEYIRDYGVSFEKPEIIKFSWINKTKDGQKKVFYVAKMADREFIEKLDLWMADLRSQLNEYNQDNKVSFKKKGKKIEELGVLDFALNKAKKNKSTKNENGWQQKLSESIQSAPLFFGEGNRVRNEEVYNLKDLLFSEIKNVENILMSSEAEDLKNIKIEYKEDGAKKGNYVLNVLARFYARFNEDGYGGWNKVKTVLENIAREAGTDFSKYGNNNNRNAGRFYLNGRERQVFTLIKFEKSITVEKILELVKLPSLLDEAYRDLVNENKNHKLRDVIQLSKTIMALVLSHSDKEKQIGGNYIHSKLSGYNALISKRDFISRYSVQTTNGTQCKLAIGKGKSKKGNEIDRYFYAFQFFKNDDSKINLKVIKNNSHKNIDFNDNENKINALQVYSSNYQIQFLDWFFEKHQGKKTSLEVGGSFTIAEKSLTIDWSGSNPRVGFKRSDTEEKRVFVSQPFTLIPDDEDKERRKERMIKTKNRFIGIDIGEYGLAWSLIEVDNGDKNNRGIRQLESGFITDNQQQVLKKNVKSWRQNQIRQTFTSPDTKIARLRESLIGSYKNQLESLMVAKKANLSFEYEVSGFEVGGKRVAKIYDSIKRGSVRKKDNNSQNDQSWGKKGINEWSFETTAAGTSQFCTHCKRWSSLAIVDIEEYELKDYNDNLFKVKINDGEVRLLGKKGWRSGEKIKGKELFGPVKDAMRPNVDGLGMKIVKRKYLKLDLRDWVSRYGNMAIFICPYVDCHHISHADKQAAFNIAV

SEQ ID NO: 158 - protein, 1210 aa, Unknown
  Description of Unknown: Candidatus Parcubacteria sequence
MSKRHPRISGVKGYRLHAQRLEYTGKSGAMRTIKYPLYSSPSGGRTVPREIVSAINDDYVGLYGLSNFDDLYNAEKRNEEKVYSVLDFWYDCVQYGAVFSYTAPGLLKNVAEVRGGSYELTKTLKGSHLYDELQIDKVIKFLNKKEISRANGSLDKLKKDIIDCFKAEYRERHKDQCNKLADDIKNAKKDAGASLGERQKKLFRDFFGISEQSENDKPSFTNPLNLTCCLLPFDTVNNNRNRGEVLFNKLKEYAQKLDKNEGSLEMWEYIGIGNSGTAFSNFLGEGFLGRLRENKITELKKAMMDITDAWRGQEQEEELEKRLRILAALTIKLREPKFDNHWGGYRSDINGKLSSWLQNYINQTVKIKEDLKGHKKDLKKAKEMINRFGESDTKEEAVVSSLLESIEKIVPDDSADDEKPDIPAIAIYRRFLSDGRLTLNRFVQREDVQEALIKERLEAEKKKKPKKRKKKSDAEDEKETIDFKELFPHLAKPLKLVPNFYGDSKRELYKKYKNAAIYTDALWKAVEKIYKSAFSSSLKNSFFDTDFDKDFFIKRLQKIFSVYRRFNTDKWKPIVKNSFAPYCDIVSLAENEVLYKPKQSRSRKSAAIDKNRVRLPSTENIAKAGIALARELSVAGFDWKDLLKKEEHEEYIDLIELHKTALALLLAVTETQLDISALDFVENGTVKDFMKTRDGNLVLEGRFLEMFSQSIVFSELRGLAGLMSRKEFITRSAIQTMNGKQAELLYIPHEFQSAKITTPKEMSRAFLDLAPAEFATSLEPESLSEKSLLKLKQMRYYPHYFGYELTRTGQGIDGGVAENALRLEKSPVKKREIKCKQYKTLGRGQNKIVLYVRSSYYQTQFLEWFLHRPKNVQTDVAVSGSFLIDEKKVKTRWNYDALTVALEPVSGSERVFVSQPFTIFPEKSAEEEGQRYLGIDIGEYGIAYTALEITGDSAKILDQNFISDPQLKTLREEVKGLKLDQRRGTFAMPSTKIARIRESLVHSLRNRIHHLALKHKAKIVYELEVSRFEEGKQKIKKVYATLKKADVYSEIDADKNLQTTVWGKLAVASEISASYTSQFCGACKKLWRAEMQVDETITTQELIGTVRVIKGGTLIDAIKDFMRPPIFDENDTPFPKYRDFCDKHHISKKMRGNSCLFICPFCRANADADIQASQTIALLRYVKEEKKVEDYFERFRKLKNIKVLGQMKKI

SEQ ID NO: 159 - protein, 1192 aa, Unknown
  Description of Unknown: Candidatus Komeilibacteria sequence
MAESKQMQCRKCGASMKYEVIGLGKKSCRYMCPDCGNHTSARKIQNKKKRDKKYGSASKAQSQRIAVAGALYPDKKVQTIKTYKYPADLNGEVHDSGVAEKIAQAIQEDEIGLLGPSSEYACWIASQKQSEPYSVVDFWFDAVCAGGVFAYSGARLLSTVLQLSGEESVLRAALASSPFVDDINLAQAEKFLAVSRRTGQDKLGKRIGECFAEGRLEALGIKDRMREFVQAIDVAQTAGQRFAAKLKIFGISQMPEAKQWNNDSGLTVCILPDYYVPEENRADQLVVLLRRLREIAYCMGIEDEAGFEHLGIDPGALSNFSNGNPKRGFLGRLLNNDIIALANNMSAMTPYWEGRKGELIERLAWLKHRAEGLYLKEPHFGNSWADHRSRIFSRIAGWLSGCAGKLKIAKDQISGVRTDLFLLKRLLDAVPQSAPSPDFIASISALDRFLEAAESSQDPAEQVRALYAFHLNAPAVRSIANKAVQRSDSQEWLIKELDAVDHLEFNKAFPFFSDTGKKKKKGANSNGAPSEEEYTETESIQQPEDAEQEVNGQEGNGASKNQKKFQRIPRFFGEGSRSEYRILTEAPQYFDMFCNNMRAIFMQLESQPRKAPRDFKCFLQNRLQKLYKQTFLNARSNKCRALLESVLISWGEFYTYGANEKKFRLRHEASERSSDPDYVVQQALEIARRLFLFGFEWRDCSAGERVDLVEIHKKAISFLLAITQAEVSVGSYNWLGNSTVSRYLSVAGTDTLYGTQLEEFLNATVLSQMRGLAIRLSSQELKDGFDVQLESSCQDNLQHLLVYRASRDLAACKRATCPAELDPKILVLPVGAFIASVMKMIERGDEPLAGAYLRHRPHSFGWQIRVRGVAEVGMDQGTALAFQKPTESEPFKIKPFSAQYGPVLWLNSSSYSQSQYLDGFLSQPKNWSMRVLPQAGSVRVEQRVALIWNLQAGKMRLERSGARAFFMPVPFSFRPSGSGDEAVLAPNRYLGLFPHSGGIEYAVVDVLDSAGFKILERGTIAVNGFSQKRGERQEEAHREKQRRGISDIGRKKPVQAEVDAANELHRKYTDVATRLGCRIVVQWAPQPKPGTAPTAQTVYARAVRTEAPRSGNQEDHARMKSSWGYTWGTYWEKRKPEDILGISTQVYWTGGIGESCPAVAVALLGHIRATSTQTEWEKEEVVFGRLKKFFPS

SEQ ID NO: 160 - protein, 1192 aa, Unknown
  Description of Unknown: Candidatus Kerfeldbacteria sequence
MAESKQMQCRKCGASMKYEVIGLGKKSCRYMCPDCGNHTSARKIQNKKKRDKKYGSASKAQSQRIAVAGALYPDKKVQTIKTYKYPADLNGEVHDRGVAEKIEQAIQEDEIGLLGPSSEYACWIASQKQSEPYSVVDFWFDAVCAGGVFAYSGARLLSTVLQLSGEESVLRAALASSPFVDDINLAQAEKFLAVSRRTGQDKLGKRIGECFAEGRLEALGIKDRMREFVQAIDVAQTAGQRFAAKLKIFGISQMPEAKQWNNDSGLTVCILPDYYVPEENRADQLVVLLRRLREIAYCMGIEDEAGFEHLGIDPGALSNFSNGNPKRGFLGRLLNNDIIALANNMSAMTPYWEGRKGELIERLAWLKHRAEGLYLKEPHFGNSWADHRSRIFSRIAGWLSGCAGKLKIAKDQISGVRTDLFLLKRLLDAVPQSAPSPDFIASISALDRFLEAAESSQDPAEQVRALYAFHLNAPAVRSIANKAVQRSDSQEWLIKELDAVDHLEFNKAFPFFSDTGKKKKKGANSNGAPSEEEYTETESIQQPEDAEQEVNGQEGNGASKNQKKFQRIPRFFGEGSRSEYRILTEAPQYFDMFCNNMRAIFMQLESQPRKAPRDFKCFLQNRLQKLYKQTFLNARSNKCRALLESVLISWGEFYTYGANEKKFRLRHEASERSSDPDYVVQQALEIARRLFLFGFEWRDCSAGERVDLVEIHKKAISFLLAITQAEVSVGSYNWLGNSTVSRYLSVAGTDTLYGTQLEEFLNATVLSQMRGLAIRLSSQELKDGFDVQLESSCQDNLQHLLVYRASRDLAACKRATCPAELDPKILVLPAGAFIASVMKMIERGDEPLAGAYLRHRPHSFGWQIRVRGVAEVGMDQGTALAFQKPTESEPFKIKPFSAQYGPVLWLNSSSYSQSQYLDGFLSQPKNWSMRVLPQAGSVRVEQRVALIWNLQAGKMRLERSGARAFFMPVPFSFRPSGSGDEAVLAPNRYLGLFPHSGGIEYAVVDVLDSAGFKILERGTIAVNGFSQKRGERQEEAHREKQRRGISDIGRKKPVQAEVDAANELHRKYTDVATRLGCRIVVQWAPQPKPGTAPTAQTVYARAVRTEAPRSGNQEDHARMKSSWGYTWSTYWEKRKPEDILGISTQVYWTGGIGESCPAVAVALLGHIRATSTQTEWEKEEVVFGRLKKFFPS

SEQ ID NO: 161 - protein, 986 aa, Unknown
  Description of Unknown: Deltaproteobacteria bacterium GWA2_43_19 Cas12e1 (CasX1) sequence
MEKRINKIRKKLSADNATKPVSRSGPMKTLLVRVMTDDLKKRLEKRRKKPEVMPQVISNNAANNLRMLLDDYTKMKEAILQVYWQEFKDDHVGLMCKFAQPASKKIDQNKLKPEMDEKGNLTTAGFACSQCGQPLFVYKLEQVSEKGKAYTNYFGRCNVAEHEKLILLAQLKPEKDSDEAVTYSLGKFGQRALDFYSIHVTKESTHPVKPLAQIAGNRYASGPVGKALSDACMGTIASFLSKYQDIIIEHQKVVKGNQKRLESLRELAGKENLEYPSVTLPPQPHTKEGVDAYNEVIARVRMWVNLNLWQKLKLSRDDAKPLLRLKGFPSFPVVERRENEVDWWNTINEVKKLIDAKRDMGRVFWSGVTAEKRNTILEGYNYLPNENDHKKREGSLENPKKPAKRQFGDLLLYLEKKYAGDWGKVFDEAWERIDKKIAGLTSHIEREEARNAEDAQSKAVLTDWLRAKASFVLERLKEMDEKEFYACEIQLQKWYGDLRGNPFAVEAENRVVDISGFSIGSDGHSIQYRNLLAWKYLENGKREFYLLMNYGKKGRIRFTDGTDIKKSGKWQGLLYGGGKAKVIDLTFDPDDEQLIILPLAFGTRQGREFIWNDLLSLETGLIKLANGRVIEKTIYNKKIGRDEPALFVALTFERREVVDPSNIKPVNLIGVDRGENIPAVIALTDPEGCPLPEFKDSSGGPTDILRIGEGYKEKQRAIQAAKEVEQRRAGGYSRKFASKSRNLADDMVRNSARDLFYHAVTHDAVLVFENLSRGFGRQGKRTFMTERQYTKMEDWLTAKLAYEGLTSKTYLSKTLAQYTSKTCSNCGFTITTADYDGMLVRLKKTSDGWATTLNNKELKAEGQITYYNRYKRQTVEKELSAELDRLSEESGNNDISKWTKGRRDEALFLLKKRFSHRPVQEQFVCLDCGHEVHADEQAALNIARSWLFLNSNSTEFKSYKSGKQPFVGAWQAFYKRRLKEVWKPNA

SEQ ID NO: 162 - protein, 978 aa, Unknown
  Description of Unknown: Plantomycetes bacterium Cas12e (CasX2) sequence
MQEIKRINKIRRRLVKDSNTKKAGKTGPMKTLLVRVMTPDLRERLENLRKKPENIPQPISNTSRANLNKLLTDYTEMKKAILHVYWEEFQKDPVGLMSRVAQPAPKNIDQRKLIPVKDGNERLTSSGFACSQCCQPLYVYKLEQVNDKGKPHTNYFGRCNVSEHERLILLSPHKPEANDELVTYSLGKFGQRALDFYSIHVTRESNHPVKPLEQIGGNSCASGPVGKALSDACMGAVASFLTKYQDIILEHQKVIKKNEKRLANLKDIASANGLAFPKITLPPQPHTKEGIEAYNNVVAQIVIWVNLNLWQKLKIGRDEAKPLQRLKGFPSFPLVERQANEVDWWDMVCNVKKLINEKKEDGKVFWQNLAGYKRQEALLPYLSSEEDRKKGKKFARYQFGDLLLHLEKKHGEDWGKVYDEAWERIDKKVEGLSKHIKLEEERRSEDAQSKAALTDWLRAKASFVIEGLKEADKDEFCRCELKLQKWYGDLRGKPFAIEAENSILDISGFSKQYNCAFIWQKDGVKKLNLYLIINYFKGGKLRFKKIKPEAFEANRFYTVINKKSGEIVPMEVNFNFDDPNLIILPLAFGKRQGREFIWNDLLSLETGSLKLANGRVIEKTLYNRRTRQDEPALFVALTFERREVLDSSNIKPMNLIGIDRGENIPAVIALTDPEGCPLSRFKDSLGNPTHILRIGESYKEKQRTIQAAKEVEQRRAGGYSRKYASKAKNLADDMVRNTARDLLYYAVTQDAMLIFENLSRGFGRQGKRTFMAERQYTRMEDWLTAKLAYEGLPSKTYLSKTLAQYTSKTCSNCGFTITSADYDRVLEKLKKTATGWMTTINGKELKVEGQITYYNRYKRQNVVKDLSVELDRLSEESVNNDISSWTKGRSGEALSLLKKRFSHRPVQEKFVCLNCGFETHADEQAALNIARSWLFLRSQEYKKYQTNKTTGNTDKRAFVETWQSFYRKKLKEVWKPAV

SEQ ID NO: 163 - protein, 855 aa, Unknown
  Description of Unknown: Cas12e3 (CasX3) sequence
MDNANKPSTKSLVNTTRISDHFGVTPGQVTRVFSFGIIPTKRQYAIIERWFAAVEAARERLYGMLYAHFQENPPAYLKEKFSYETFFKGRPVLNGLRDIDPTIMTSAVFTALRHKAEGAMAAFHTNHRRLFEEARKKMREYAECLKANEALLRGAADIDWDKIVNALRTRLNTCLAPEYDAVIADFGALCAFRALIAETNALKGAYNHALNQMLPALVKVDEPEEAEESPRLRFFNGRINDLPKFPVAERETPPDTETIIRQLEDMARVIPDTAEILGYIHRIRHKAARRKPGSAVPLPQRVALYCAIRMERNPEEDPSTVAGHFLGEIDRVCEKRRQGLVRTPFDSQIRARYMDIISFRATLAHPDRWTEIQFLRSNAASRRVRAETISAPFEGFSWTSNRTNPAPQYGMALAKDANAPADAPELCICLSPSSAAFSVREKGGDLIYMRPTGGRRGKDNPGKEITWVPGSFDEYPASGVALKLRLYFGRSQARRMLTNKTWGLLSDNPRVFAANAELVGKKRNPQDRWKLFFHMVISGPPPVEYLDFSSDVRSRARTVIGINRGEVNPLAYAVVSVEDGQVLEEGLLGKKEYIDQLIETRRRISEYQSREQTPPRDLRQRVRHLQDTVLGSARAKIHSLIAFWKGILAIERLDDQFHGREQKIIPKKTYLANKTGFMNALSFSGAVRVDKKGNPWGGMIEIYPGGISRTCTQCGTVWLARRPKNPGHRDAMVVIPDIVDDAAATGFDNVDCDAGTVDYGELFTLSREWVRLTPRYSRVMRGTLGDLERAIRQGDDRKSRQMLELALEPQPQWGQFFCHRCGFNGQSDVLAATNLARRAISLIRRLPDTDTPPTP

SEQ ID NO: 164 - protein, 707 aa, Unknown
  Description of Unknown: Cas12J_1947455 sequence
MADTPTLFTQFLRHHLPGQRFRKDILKQAGRILANKGEDATIAFLRGKSEESPPDFQPPVKCPIIACSRPLTEWPIYQASVAIQGYVYGQSLAEFEASDPGCSKDGLLGWFDKTGVCTDYFSVQGLNLIFQNARKRYIGVQTKVTNRNEKRHKKLKRINAKRIAEGLPELTSDEPESALDETGHLIDPPGLNTNIYCYQQVSPKPLALSEVNQLPTAYAGYSTSGDDPIQPMVTKDRLSISKGQPGYIPEHQRALLSQKKHRRMRGYGLKARALLVIVRIQDDWAVIDLRSLLRNAYWRRIVQTKEPSTITKLLKLVTGDPVLDATRMVATFTYKPGIVQVRSAKCLKNKQGSKLFSERYLNETVSVTSIDLGSNNLVAVATYRLVNGNTPELLQRFTLPSHLVKDFERYKQAHDTLEDSIQKTAVASLPQGQQTEIRMWSMYGFREAQERVCQELGLADGSIPWNVMTATSTILTDLFLARGGDPKKCMFTSEPKKKKNSKQVLYKIRDRAWAKMYRTLLSKETREAWNKALWGLKRGSPDYARLSKRKEELARRCVNYTISTAEKRAQCGRTIVALEDLNIGFFHGRGKQEPGWVGLFTRKKENRWLMQALHKAFLELAHHRGYHVIEVNPAYTSQTCPVCRHCDPDNRDQHNREAFHCIGCGFRGNADLDVATHNIAMVAITGESLKRARGSVASKTPQPLAAE

SEQ ID NO: 165 - protein, 757 aa, Unknown
  Description of Unknown: Cas12J_2071242 sequence
MPKPAVESEFSKVLKKHFPGERFRSSYMKRGGKILAAQGEEAVVAYLQGKSEEEPPNFQPPAKCHVVTKSRDFAEWPIMKASEAIQRYIYALSTTERAACKPGKSSESHAAWFAATGVSNHGYSHVQGLNLIFDHTLGRYDGVLKKVQLRNEKARARLESINASRADEGLPEIKAEEEEVATNETGHLLQPPGINPSFYVYQTISPQAYRPRDEIVLPPEYAGYVRDPNAPIPLGVVRNRCDIQKGCPGYIPEWQREAGTAISPKTGKAVTVPGLSPKKNKRMRRYWRSEKEKAQDALLVTVRIGTDWVVIDVRGLLRNARWRTIAPKDISLNALLDLFTGDPVIDVRRNIVTFTYTLDACGTYARKWTLKGKQTKATLDKLTATQTVALVAIDLGQTNPISAGISRVTQENGALQCEPLDRFTLPDDLLKDISAYRIAWDRNEEELRARSVEALPEAQQAEVRALDGVSKETARTQLCADFGLDPKRLPWDKMSSNTTFISEALLSNSVSRDQVFFTPAPKKGAKKKAPVEVMRKDRTWARAYKPRLSVEAQKLKNEALWALKRTSPEYLKLSRRKEELCRRSINYVIEKTRRRTQCQIVIPVIEDLNVRFFHGSGKRLPGWDNFFTAKKENRWFIQGLHKAFSDLRTHRSFYVFEVRPERTSITCPKCGHCEVGNRDGEAFQCLSCGKTCNADLDVATHNLTQVALTGKTMPKREEPRDAQGTAPARKTKKASKSKAPPAEREDQTPAQEPSQTS

SEQ ID NO: 166 - protein, 765 aa, Unknown
  Description of Unknown: Cas12J_1973640 sequence
MYILEMADLKSEPSLLAKLLRDRFPGKYWLPKYWKLAEKKRLTGGEEAACEYMADKQLDSPPPNFRPPARCVILAKSRPFEDWPVHRVASKAQSFVIGLSEQGFAALRAAPPSTADARRDWLRSHGASEDDLMALEAQLLETIMGNAISLHGGVLKKIDNANVKAAKRLSGRNEARLNKGLQELPPEQEGSAYGADGLLVNPPGLNLNIYCRKSCCPKPVKNTARFVGHYPGYLRDSDSILISGTMDRLTIIEGMPGHIPAWQREQGLVKPGGRRRRLSGSESNMRQKVDPSTGPRRSTRSGTVNRSNQRTGRNGDPLLVEIRMKEDWVLLDARGLLRNLRWRESKRGLSCDHEDLSLSGLLALFSGDPVIDPVRNEVVFLYGEGIIPVRSTKPVGTRQSKKLLERQASMGPLTLISCDLGQTNLIAGRASAISLTHGSLGVRSSVRIELDPEIIKSFERLRKDADRLETEILTAAKETLSDEQRGEVNSHEKDSPQTAKASLCRELGLHPPSLPWGQMGPSTTFIADMLISHGRDDDAFLSHGEFPTLEKRKKFDKRFCLESRPLLSSETRKALNESLWEVKRTSSEYARLSQRKKEMARRAVNFVVEISRRKTGLSNVIVNIEDLNVRIFHGGGKQAPGWDGFFRPKSENRWFIQAIHKAFSDLAAHHGIPVIESDPQRTSMTCPECGHCDSKNRNGVRFLCKGCGASMDADFDAACRNLERVALTGKPMPKPSTSCERLLSATTGKVCSDHSLSHDAIEKAS

SEQ ID NO: 167 - protein, 766 aa, Unknown
  Description of Unknown: Cas12J_3339380 sequence
MEKEITELTKIRREFPNKKFSSTDMKKAGKLLKAEGPDAVRDFLNSCQEIIGDFKPPVKTNIVSISRPFEEWPVSMVGRAIQEYYFSLTKEELESVHPGTSSEDHKSFFNITGLSNYNYTSVQGLNLIFKNAKAIYDGTLVKANNKNKKLEKKFNEINHKRSLEGLPIITPDFEEPFDENGHLNNPPGINRNIYGYQGCAAKVFVPSKHKMVSLPKEYEGYNRDPNLSLAGFRNRLEIPEGEPGHVPWFQRMDIPEGQIGHVNKIQRFNFVHGKNSGKVKFSDKTGRVKRYHHSKYKDATKPYKFLEESKKVSALDSILAIITIGDDWVVFDIRGLYRNVFYRELAQKGLTAVQLLDLFTGDPVIDPKKGVVTFSYKEGVVPVFSQKIVPRFKSRDTLEKLTSQGPVALLSVDLGQNEPVAARVCSLKNINDKITLDNSCRISFLDDYKKQIKDYRDSLDELEIKIRLEAINSLETNQQVEIRDLDVFSADRAKANTVDMFDIDPNLISWDSMSDARVSTQISDLYLKNGGDESRVYFEINNKRIKRSDYNISQLVRPKLSDSTRKNLNDSIWKLKRTSEEYLKLSKRKLELSRAVVNYTIRQSKLLSGINDIVIILEDLDVKKKFNGRGIRDIGWDNFFSSRKENRWFIPAFHKAFSELSSNRGLCVIEVNPAWTSATCPDCGFCSKENRDGINFTCRKCGVSYHADIDVATLNIARVAVLGKPMSGPADRERLGDTKKPRVARSRKTMKRKDISNSTVEAMVTA

SEQ ID NO: 168 - protein, 812 aa, Unknown
  Description of Unknown: Cas12J_10037042_3 sequence
MDMLDTETNYATETPAQQQDYSPKPPKKAQRAPKGFSKKARPEKKPPKPITLFTQKHFSGVRFLKRVIRDASKILKLSESRTITFLEQAIERDGSAPPDVTPPVHNTIMAVTRPFEEWPEVILSKALQKHCYALTKKIKIKTWPKKGPGKKCLAAWSARTKIPLIPGQVQATNGLFDRIGSIYDGVEKKVTNRNANKKLEYDEAIKEGRNPAVPEYETAYNIDGTLINKPGYNPNLYITQSRTPRLITEADRPLVEKILWQMVEKKTQSRNQARRARLEKAAHLQGLPVPKFVPEKVDRSQKIEIRIIDPLDKIEPYMPQDRMAIKASQDGHVPYWQRPFLSKRRNRRVRAGWGKQVSSIQAWLTGALLVIVRLGNEAFLADIRGALRNAQWRKLLKPDATYQSLFNLFTGDPVVNTRTNHLTMAYREGVVNIVKSRSFKGRQTREHLLTLLGQGKTVAGVSFDLGQKHAAGLLAAHFGLGEDGNPVFTPIQACFLPQRYLDSLTNYRNRYDALTLDMRRQSLLALTPAQQQEFADAQRDPGGQAKRACCLKLNLNPDEIRWDLVSGISTMISDLYIERGGDPRDVHQQVETKPKGKRKSEIRILKIRDGKWAYDFRPKIADETRKAQREQLWKLQKASSEFERLSRYKINIARAIANWALQWGRELSGCDIVIPVLEDLNVGSKFFDGKGKWLLGWDNRFTPKKENRWFIKVLHKAVAELAPHRGVPVYEVMPHRTSMTCPACHYCHPTNREGDRFECQSCHVVKNTDRDVAPYNILRVAVEGKTLDRWQAEKKPQAEPDRPMILIDNQES

SEQ ID NO: 169 - protein, 812 aa, Unknown
  Description of Unknown: Cas12J_10020921_9 sequence
MDMLDTETNYATETPAQQQDYSPKPPKKAQRAPKGFSKKARPEKKPPKPITLFTQKHFSGVRFLKRVIRDASKILKLSESRTITFLEQAIERDGSAPPDVTPPVHNTIMAVTRPFEEWPEVILSKALQKHCYALTKKIKIKTWPKKGPGKKCLAAWSARTKIPLIPGQVQATNGLFDRIGSIYDGVEKKVTNRNANKKLEYDEAIKEGRNPAVPEYETAYNIDGTLINKPGYNPNLYITQSRTPRLITEADRPLVEKILWQMVEKKTQSRNQARRARLEKAAHLQGLPVPKFVPEKVDRSQKIEIRIIDPLDKIEPYMPQDRMAIKASQDGHVPYWQRPFLSKRRNRRVRAGWGKQVSSIQAWLTGALLVIVRLGNEAFLADIRGALRNAQWRKLLKPDATYQSLFNLFTGDPVVNTRTNHLTMAYREGVVDIVKSRSFKGRQTREHLLTLLGQGKTVAGVSFDLGQKHAAGLLAAHFGLGEDGNPVFTPIQACFLPQRYLDSLTNYRNRYDALTLDMRRQSLLALTPAQQQEFADAQRDPGGQAKRACCLKLNLNPDEIRWDLVSGISTMISDLYIERGGDPRDVHQQVETKPKGKRKSEIRILKIRDGKWAYDFRPKIADETRKAQREQLWKLQKASSEFERLSRYKINIARAIANWALQWGRELSGCDIVIPVLEDLNVGSKFFDGKGKWLLGWDNRFTPKKENRWFIKVLHKAVAELAPHKGVPVYEVMPHRTSMTCPACHYCHPTNREGDRFECQSCHVVKNTDRDVAPYNILRVAVEGKTLDRWQAEKKPQAEPDRPMILIDNQES

SEQ ID NO: 170 - protein, 793 aa, Unknown
  Description of Unknown: Cas12J_10000002_47 sequence
MSSLPTPLELLKQKHADLFKGLQFSSKDNKMAGKVLKKDGEEAALAFLSERGVSRGELPNFRPPAKTLVVAQSRPFEEFPIYRVSEAIQLYVYSLSVKELETVPSGSSTKKEHQRFFQDSSVPDFGYTSVQGLNKIFGLARGIYLGVITRGENQLQKAKSKHEALNKKRRASGEAETEFDPTPYEYMTPERKLAKPPGVNHSIMCYVDISVDEFDFRNPDGIVLPSEYAGYCREINTAIEKGTVDRLGHLKGGPGYIPGHQRKESTTEGPKINFRKGRIRRSYTALYAKRDSRRVRQGKLALPSYRHHMMRLNSNAESAILAVIFFGKDWVVFDLRGLLRNVRWRNLFVDGSTPSTLLGMFGDPVIDPKRGVVAFCYKEQIVPVVSKSITKMVKAPELLNKLYLKSEDPLVLVAIDLGQTNPVGVGVYRVMNASLDYEVVTRFALESELLREIESYRQRTNAFEAQIRAETFDAMTSEEQEEITRVRAFSASKAKENVCHRFGMPVDAVDWATMGSNTIHIAKWVMRHGDPSLVEVLEYRKDNEIKLDKNGVPKKVKLTDKRIANLTSIRLRFSQETSKHYNDTMWELRRKHPVYQKLSKSKADFSRRVVNSIIRRVNHLVPRARIVFIIEDLKNLGKVFHGSGKRELGWDSYFEPKSENRWFIQVLHKAFSETGKHKGYYIIECWPNWTSCTCPKCSCCDSENRHGEVFRCLACGYTCNTDFGTAPDNLVKIATTGKGLPGPKKRCKGSSKGKNPKIARSSETGVSVTESGAPKVKKSSPTQTSQSSSQSAP

SEQ ID NO: 171 - protein, 441 aa, Unknown
  Description of Unknown: Cas12J_10100763_4 sequence
MNKIEKEKTPLAKLMNENFAGLRFPFAIIKQAGKKLLKEGELKTIEYMTGKGSIEPLPNFKPPVKCLIVAKRRDLKYFPICKASCEIQSYVYSLNYKDFMDYFSTPMTSQKQHEEFFKKSGLNIEYQNVAGLNLIFNNVKNTYNGVILKVKNRNEKLKKKAIKNNYEFEEIKTFNDDGCLINKPGINNVIYCFQSISPKILKNITHLPKEYNDYDCSVDRNIIQKYVSRLDIPESQPGHVPEWQRKLPEFNNTNNPRRRRKWYSNGRNISKGYSVDQVNQAKIEDSLLAQIKIGEDWIILDIRGLLRDLNRRELISYKNKLTIKDVLGFFSDYPIIDIKKNLVTFCYKEGVIQVVSQKSIGNKKSKQLLEKLIENKPIALVSIDLGQTNPVSVKISKLNKINNKISIESFTYRFLNEEILKEIEKYRKDYDKLELKLINEA

SEQ ID NO: 172 - protein, 812 aa, Unknown
  Description of Unknown: Cas12J_10004149_10 sequence
MDMLDTETNYATETPSQQQDYSPKPPKKDRRAPKGFSKKARPEKKPPKPITLFTQKHFSGVRFLKRVIRDASKILKLSESRTITFLEQAIERDGSAPPDVTPPVHNTIMAVTRPFEEWPEVILSKALQKHCYALTKKIKIKTWPKKGPGKKCLAAWSARTKIPLIPGQVQATNGLFDRIGSIYDGVEKKVTNRNANKKLEYDEAIKEGRNPAVPEYETAYNIDGTLINKPGYNPNLYITQSRTPRLITEADRPLVEKILWQMVEKKTQSRNQARRARLEKAAHLQGLPVPKFVPEKVDRSQKIEIRIIDPLDKIEPYMPQDRMAIKASQDGHVPYWQRPFLSKRRNRRVRAGWGKQVSSIQAWLTGALLVIVRLGNEAFLADIRGALRNAQWRKLLKPDATYQSLFNLFTGDPVVNTRTNHLTMAYREGVVDIVKSRSFKGRQTREHLLTLLGQGKTVAGVSFDLGQKHAAGLLAAHFGLGEDGNPVFTPIQACFLPQRYLDSLTNYRNRYDALTLDMRRQSLLALTPAQQQEFADAQRDPGGQAKRACCLKLNLNPDEIRWDLVSGISTMISDLYIERGGDPRDVHQQVETKPKGKRKSEIRILKIRDGKWAYDFRPKIADETRKAQREQLWKLQKASSEFERLSRYKINIARAIANWALQWGRELSGCDIVIPVLEDLNVGSKFFDGKGKWLLGWDNRFTPKKENRWFIKVLHKAVAELAPHRGVPVYEVMPHRTSMTCPACHYCHPTNREGDRFECQSCHVVKNTDRDVAPYNILRVAVEGKTLDRWQAEKKPQAEPDRPMILIDNQES

SEQ ID NO: 173 - protein, 812 aa, Unknown
  Description of Unknown: Cas12J_10000724_71 sequence
MDMLDTETNYATETPSQQQDYSPKPPKKDRRAPKGFSKKARPEKKPPKPITLFTQKHFSGVRFLKRVIRDASKILKLSESRTITFLEQAIERDGSAPPDVTPPVHNTIMAVTRPFEEWPEVILSKALQKHCYALTKKIKIKTWPKKGPGKKCLAAWSARTKIPLIPGQVQATNGLFDRIGSIYDGVEKKVTNRNANKKLEYDEAIKEGRNPAVPEYETAYNIDGTLINKPGYNPNLYITQSRTPRLITEADRPLVEKILWQMVEKKTQSRNQARRARLEKAAHLQGLPVPKFVPEKVDRSQKIEIRIIDPLDKIEPYMPQDRMAIKASQDGHVPYWQRPFLSKRRNRRVRAGWGKQVSSIQAWLTGALLVIVRLGNEAFLADIRGALRNAQWRKLLKPDATYQSLFNLFTGDPVVNTRTNHLTMAYREGVVNIVKSRSFKGRQTREHLLTLLGQGKTVAGVSFDLGQKHAAGLLAAHFGLGEDGNPVFTPIQACFLPQRYLDSLTNYRNRYDALTLDMRRQSLLALTPAQQQEFADAQRDPGGQAKRACCLKLNLNPDEIRWDLVSGISTMISDLYIERGGDPRDVHQQVETKPKGKRKSEIRILKIRDGKWAYDFRPKIADETRKAQREQLWKLQKASSEFERLSRYKINIARAIANWALQWGRELSGCDIVIPVLEDLNVGSKFFDGKGKWLLGWDNRFTPKKENRWFIKVLHKAVAELAPHRGVPVYEVMPHRTSMTCPACHYCHPTNREGDRFECQSCHVVKNTDRDVAPYNILRVAVEGKTLDRWQAEKKPQAEPDRPMILIDNQES

SEQ ID NO: 174 - protein, 772 aa, Unknown
  Description of Unknown: Cas12J_1000001_267 sequence
MSNTAVSTREHMSNKTTPPSPLSLLLRAHFPGLKFESQDYKIAGKKLRDGGPEAVISYLTGKGQAKLKDVKPPAKAFVIAQSRPFIEWDLVRVSRQIQEKIFGIPATKGRPKQDGLSETAFNEAVASLEVDGKSKLNEETRAAFYEVLGLDAPSLHAQAQNALIKSAISIREGVLKKVENRNEKNLSKTKRRKEAGEEATFVEEKAHDERGYLIHPPGVNQTIPGYQAVVIKSCPSDFIGLPSGCLAKESAEALTDYLPHDRMTIPKGQPGYVPEWQHPLLNRRKNRRRRDWYSASLNKPKATCSKRSGTPNRKNSRTDQIQSGRFKGAIPVLMRFQDEWVIIDIRGLLRNARYRKLLKEKSTIPDLLSLFTGDPSIDMRQGVCTFIYKAGQACSAKMVKTKNAPEILSELTKSGPVVLVSIDLGQTNPIAAKVSRVTQLSDGQLSHETLLRELLSNDSSDGKEIARYRVASDRLRDKLANLAVERLSPEHKSEILRAKNDTPALCKARVCAALGLNPEMIAWDKMTPYTEFLATAYLEKGGDRKVATLKPKNRPEMLRRDIKFKGTEGVRIEVSPEAAEAYREAQWDLQRTSPEYLRLSTWKQELTKRILNQLRHKAAKSSQCEVVVMAFEDLNIKMMHGNGKWADGGWDAFFIKKRENRWFMQAFHKSLTELGAHKGVPTIEVTPHRTSITCTKCGHCDKANRDGERFACQKCGFVAHADLEIATDNIERVALTGKPMPKPESERSGDAKKSVGARKAAFKPEEDAEAAE

SEQ ID NO: 175 - protein, 717 aa, Unknown
  Description of Unknown: Cas12J_10000286_53 sequence
MIKPTVSQFLTPGFKLIRNHSRTAGLKLKNEGEEACKKFVRENEIPKDECPNFQGGPAIANIIAKSREFTEWEIYQSSLAIQEVIFTLPKDKLPEPILKEEWRAQWLSEHGLDTVPYKEAAGLNLIIKNAVNTYKGVQVKVDNKNKNNLAKINRKNEIAKLNGEQEISFEEIKAFDDKGYLLQKPSPNKSIYCYQSVSPKPFITSKYHNVNLPEEYIGYYRKSNEPIVSPYQFDRLRIPIGEPGYVPKWQYTFLSKKENKRRKLSKRIKNVSPILGIICIKKDWCVFDMRGLLRTNHWKKYHKPTDSINDLFDYFTGDPVIDTKANVVRFRYKMENGIVNYKPVREKKGKELLENICDQNGSCKLATVDVGQNNPVAIGLFELKKVNGELTKTLISRHPTPIDFCNKITAYRERYDKLESSIKLDAIKQLTSEQKIEVDNYNNNFTPQNTKQIVCSKLNINPNDLPWDKMISGTHFISEKAQVSNKSEIYFTSTDKGKTKDVMKSDYKWFQDYKPKLSKEVRDALSDIEWRLRRESLEFNKLSKSREQDARQLANWISSMCDVIGIENLVKKNNFFGGSGKREPGWDNFYKPKKENRWWINAIHKALTELSQNKGKRVILLPAMRTSITCPKCKYCDSKNRNGEKFNCLKCGIELNADIDVATENLATVAITAQSMPKPTCERSGDAKKPVRARKAKAPEFHDKLAPSYTVVLREAV

SEQ ID NO: 176 - protein, 793 aa, Unknown
  Description of Unknown: Cas12J_10001283_7 sequence
MRSSREIGDKILMRQPAEKTAFQVFRQEVIGTQKLSGGDAKTAGRLYKQGKMEAAREWLLKGARDDVPPNFQPPAKCLVVAVSHPFEEWDISKTNHDVQAYIYAQPLQAEGHLNGLSEKWEDTSADQHKLWFEKTGVPDRGLPVQAINKIAKAAVNRAFGVVRKVENRNEKRRSRDNRIAEHNRENGLTEVVREAPEVATNADGFLLHPPGIDPSILSYASVSPVPYNSSKHSFVRLPEEYQAYNVEPDAPIPQFVVEDRFAIPPGQPGYVPEWQRLKCSTNKHRRMRQWSNQDYKPKAGRRAKPLEFQAHLTRERAKGALLVVMRIKEDWVVFDVRGLLRNVEWRKVLSEEAREKLTLKGLLDLFTGDPVIDTKRGIVTFLYKAEITKILSKRTVKTKNARDLLLRLTEPGEDGLRREVGLVAVDLGQTHPIAAAIYRIGRTSAGALESTVLHRQGLREDQKEKLKEYRKRHTALDSRLRKEAFETLSVEQQKEIVTVSGSGAQITKDKVCNYLGVDPSTLPWEKMGSYTHFISDDFLRRGGDPNIVHFDRQPKKGKVSKKSQRIKRSDSQWVGRMRPRLSQETAKARMEADWAAQNENEEYKRLARSKQELARWCVNTLLQNTRCITQCDEIVVVIEDLNVKSLHGKGAREPGWDNFFTPKTENRWFIQILHKTFSELPKHRGEHVIEGCPLRTSITCPACSYCDKNSRNGEKFVCVACGATFHADFEVATYNLVRLATTGMPMPKSLERQGGGEKAGGARKARKKAKQVEKIVVQANANVTMNGASLHSP

SEQ ID NO: 177 - protein, 793 aa, Unknown; identical to SEQ ID NO: 170
  Description of Unknown: Cas12J_1000002_112 sequence

SEQ ID NO: 178 - protein, 717 aa, Unknown; identical to SEQ ID NO: 175
  Description of Unknown: Cas12J_10000506_8 sequence

SEQ ID NO: 179 - protein, 772 aa, Unknown; identical to SEQ ID NO: 174
  Description of Unknown: Cas12J_1000007_143 sequence

SEQ ID NO: 180 - protein, 765 aa, Unknown
  Description of Unknown: Cas12J_3877103_16 sequence
MYSLEMADLKSEPSLLAKLLRDRFPGKYWLPKYWKLAEKKRLTGGEEAACEYMADKQLDSPPPNFRPPARCVILAKSRPFEDWPVHRVASKAQSFVIGLSEQGFAALRAAPPSTADARRDWLRSHGASEDDLMALEAQLLETIMGNAISLHGGVLKKIDNANVKAAKRLSGRNEARLNKGLQELPPEQEGSAYGADGLLVNPPGLNLNIYCRKSCCPKPVKNTARFVGHYPGYLRDSDSILISGTMDRLTIIEGMPGHIPAWQREQGLVKPGGRRRRLSGSESNMRQKVDPSTGPRRSTRSGTVNRSNQRTGRNGDPLLVEIRMKEDWVLLDARGLLRNLRWRESKRGLSCDHEDLSLSGLLALFSGDPVIDPVRNEVVFLYGEGIIPVRSTKPVGTRQSKKLLERQASMGPLTLISCDLGQTNLIAGRASAISLTHGSLGVRSSVRIELDPEIIKSFERLRKDADRLETEILTAAKETLSDEQRGEVNSHEKDSPQTAKASLCRELGLHPPSLPWGQMGPSTTFIADMLISHGRDDDAFLSHGEFPTLEKRKKFDKRFCLESRPLLSSETRKALNESLWEVKRTSSEYARLSQRKKEMARRAVNFVVEISRRKTGLSNVIVNIEDLNVRIFHGGGKQAPGWDGFFRPKSENRWFIQAIHKAFSDLAAHHGIPVIESDPQRTSMTCPECGHCDSKNRNGVRFLCKGCGASMDADFDAACRNLERVALTGKPMPKPSTSCERLLSATTGKVCSDHSLSHDAIEKAS

SEQ ID NO: 181 - protein, 766 aa, Unknown
  Description of Unknown: Cas12J_877636_12 sequence
MEKEITELTKIRREFPNKKFSSTDMKKAGKLLKAEGPDAVRDFLNSCQEIIGDFKPPVKTNIVSISRPFEEWPVSMVGRAIQEYYFSLTKEELESVHPGTSSEDHKSFFNITGLSNYNYTSVQGLNLIFKNAKAIYDGTLVKANNKNKKLEKKFNEINHKRSLEGLPIITPDFEEPFDENGHLNNPPGINRNIYGYQGCAAKVFVPSKHKMVSLPKEYEGYNRDPNLSLAGFRNRLEIPEGEPGHVPWFQRMDIPEGQIGHVNKIQRFNFVHGKNSGKVKFSDKTGRVKRYHHSKYKDATKPYKFLEESKKVSALDSILAIITIGDDWVVFDIRGLYRNVFYRELAQKGLTAVQLLDLFTGDPVIDPKKGVVTFSYKEGVVPVFSQKIVPRFKSRDTLEKLTSQGPVALLSVDLGQNEPVAARVCSLKNINDKITLDNSCRISFLDDYKKQIKDYRDSLDELEIKIRLEAINSLETNQQVEIRDLDVFSADRAKANTVDMFDIDPNLISWDSMSDARVSTQISDLYLKNGGDESRVYFEINNKRIKRSDYNISQLVRPKLSDSTRKNLNDSIWKLKRTSEEYLKLSKRKLELSRAVVNYTIRQSKLLSGINDIVIILEDLDVKKKFNGRGIRDIGWDNFFSSRKENRWFIPAFHKTFSELSSNRGLCVIEVNPAWTSATCPDCGFCSKENRDGINFTCRKCGVSYHADIDVATLNIARVAVLGKPMSGPADRERLGDTKKPRVARSRKTMKRKDISNSTVEAMVTA

SEQ ID NO: 182 - protein, 746 aa, Unknown
  Description of Unknown: Cas12L_1_257905508 sequence
MASHKKTESNQIIKTFSFKIKNANGLSLDVLNDAITEYQNYYNICSDWIKDHLTMKISELYKYIPNEKKNSGYALTLISDEWKDKPMYMMFKKGYPANNRDNAIYETLNTCNTEHYTGNILNFSDTYYRRFGYVASAISNYVTKISKMSTGSRSKNISNDSDVDTIMEQVIYEMEHNGWTSVKDWENQMEYLESKTDSNPNFVYRMTTLYEFYKSHIDEVNSKMETMSIDSLIKFGGCRRKDSKKSMYIMGGSNTPFDITQIGGNSLNIKFSKNLNVDVFGRYDVIKDNTLLVDIINGHGASFVLKIINDEIYIDINVSVPFDKKIATTNKVVGIDVNIKHMLLATNILDDGNVKGYVNIYKEVINDSDFKKVCNSTVMQYFTDFSKFVTFCPLEFDFLFSRVCNQKGIYNDNSAMEKSFSDVLNKLKWNFIETGDNTKRIYIENVMKLRSQMKAYAIVKNAYYKQQSEYDFGKSEEFIQEHPFSNTDKGIEILNKLDNISKKILGCRNNIIQYSYNLFEINGYDMVSLEKLTSSQFKKKPFPTVNSLLKYHKILGCTQEEMEKKDIYSVIKKGYYDIIFDNDVVTDAKLSAKGELSKFKDDFFNLMIKSIHFADIKDYFITLSNNGTAGVSLVPSYFTSQMDSIDHKIYFVQDNKSGKLKLANKHKVRSSQEKHINGLNADYNAARNIAYIMENTDCRNMFMKQSRTDKSLYNKPSYETFIKTQGSAVAKLKKEGFVKILDEASV

SEQ ID NO: 183 - protein, 735 aa, Unknown
  Description of Unknown: Cas12L_2_196848753 sequence
MAHKKNVGAEIVKTYSFKVKNTNGITMEKLMNAIDEFQSYYNLCSDWICKNLTTMTIGDLDQYIPEKAKGNTYATVLLDEAWKNQPLYKIFGKKYSSNNRNNALYCALSSVIDMTKENVLGFSKTHYIRNDYILNVISNYASKLSKLNTGVKSRAIKETSDEATIIEQVIYEMEHNKWESIEDWKNQIEYLNSKTDYNPTYMERMKTLSAYYSTHKSEVDAKMQEMAVENLVKFGGCRRNNSKKSMFIMGSNTTNYTISYIGGNSFNINFANILNFDVYGRRDVVKNGEVLVDIMANHGDSIVLKIVNGELYADVPCSVTLNKVESNFDKVVGIDVNMKHMLLSTSITDNGSSDFLNIYKEMSNNAEFMALCPEEDRKYYKDISKYVTFAPLELDLLFSRISKQGKVKMEKVYSEILEALKWKFFANGDNKNRIYVESIQKIRQQIKALCVIKNAYYEQQSAYDIDKTQEYIETHPFSLTEKGMSIKSKMDKICQTIIGCRNNIIDYAYSFFERNGYSIIGLEKLTSSQFEKTKSMPTCKSLLNFHKVLGHTLSELETLPINDVVKKGYYTFTTDNEGKITDASLSEKGKVRKMKDDFFNQAIKAIHFADVKDYFATLSNNGQTGIFFVPSQFTSQMDSNTHNLYFENAKNGGLKLAPKYKVRQTQEYHLNGLPADYNAARNIAYIGLDETMRNTFLKKANSNKSLYNQPIYDTGIKKTAGVFSRMKKLKRYEII

SEQ ID NO: 184 - protein, 778 aa, Unknown
  Description of Unknown: Cas12L_3_66741167 sequence
MRISPHLFYIFFKKIWKCHFFVLSLYQLNQYIMASHEKTESNQIIKTFSFKIKNANGLSLDVLNDAITEYQNYYNICSDWIKDHLTMKIGELYKYIPDEKKNSGYALTLISDEWKDKPMYMMFKKGYPANNRDNAIYETLNTCNTEHYTGNILNFSDTYYRRFGYVASAISNYVTKISKMSTGSRSKNISNDSDVDTIMEQVIYEMEHNGWTSVKDWENQMEYLESKTDSNPNFVYRMTTLYEFYKSHIDEVNSKMETMSIDSLIKFGGCRRKDSKKSMYIMGGSNTPFDITQIGGNSLNIKFSKNLNVDVFGRYDVIKDNTLLVDIINGHGASFVLKIINGEIYIDINVSVPFDKKIATTNKVVGIDVNIKHMLLATNILDDGNVNGYVNIYKEVINDSDFKKVCNSTVMKYFTDFSKFVTFCPLEFDFLFSRVCNQKGIYNDNSAMEKSFSDVLNKLKWNFIETGDNTKRIYIENVMKLRSQMKAYAIVKNAYYKQQSEYDFGKSEEFIQEHPFSNTDKGIEILNKLDNISKKILGCRNNIIQYSYNLFEINGYDMISLEKLTSSQFKKKPFPTVNSLLKYHKILGCTQEEMEKKDIYSVIKKGYYDIIFDNDVVTDAKLSTKGELSKFKDDFFNLMIKSIHFADIKDYFITLSNNGTAGVSLVPSYFTSQMDSIDHKIYFVQDNKSGKLKLANKHKVRSSQEKHINGLNADYNAARNIAYIMENTECRNMFMKQSRTDKSLYNKPSYETFIKTQGSAVAKLKKEGFVKILDEASV

SEQ ID NO: 185 - protein, 778 aa, Unknown
  Description of Unknown: Cas12L_4_67031163 sequence
MRISPHLFYIFFKKIWKSHFFVLSLYQLNQYIMASHKKTESNQIIKTFSFKIKNANGLSLDVLNDAITEYQNYYNICSDWIKDHLTMKIGELYKYIPDEKKNSGYALTLISDEWKDKPMYMMFKKGYPANNRDNAIYETLNTCNTEHYTGNILNFPDTYYRRFGYVASTISNYVTKISKMSTGSRSKNISNDSDVDTIMEQVIYEMEHNGWTSVKDWENQMEYLESKTDSNPNFVYRMTTLYEFYKSHIDEVNSKMETMSIDSLIKFGGCRRKDSKKSMYIMGGSNTPFDITQIGGNSLNIKFSKNLNVDVFGRYDVIKDNTLLVDIINGHGASFVLKIINGEIYIDINVSVPFDKKIATTNKVVGIDVNIKHMLLATNILDDGNVNGYVNIYKEVINDSDFKKVCNSTVMKYFTDFSKFVTFCPLEFDFLFSRVCNQKGIYNDNSAMEKSFSDVLNKLKWNFIETGDNTKRIYIENVMKLRSQMKAYAIVKNAYYKQQSEYDFGKSEEFIQEHPFSNTDKGIEILNKLDNISKKILGCRNNIIQYSYNLFEINGYDMISLEKLTSSQFKKNPFPTVNSLLKYHKILGCTQEEMEKKDIYSVIKKGYYDIIFDNDVVTDAKLSTKGELSKFKDDFFNLMIKSIHFADIKDYFITLSNNGTAGVSLVPSYFTSQMDSIDHKIYFVQDNKSGKLKLANKHKVRSSQEKHINGLNADYNAARNIAYIMENTECRNMFMKQSRTDKSLYNKPSYETFIKTQGSAVAKLKKEGFVKILDEASV

SEQ ID NO: 186 - protein, 778 aa, Unknown
  Description of Unknown: Cas12L_5_67793351 sequence
MRISPHLFYIFFKKIWKCHIFVLSLYQLNQYIMASHKKTESNQIIKTFSFKIKNANGLSLDVLNDAITEYQNYYNICSDWIKDHLTMKIGELYKYIPDEKKNSGYALTLISDEWKDKPMYMMFKKGYPANNRDNAIYETLNTCNTEHYTGNILNFSDTYYRRFGYVASTISNYVTKISKMSTGSRSKNISNDSDVDTIMEQVIYEMEHNGWTSVKDWENQMEYLESKTDSNPNFVYRMTTLYEFYKSHIDEVNSKMETMSIDSLIKFGGCRRKDSKKSMYIMGGSNTPFDITQIGGNSLNIKFSKNLNVDVFGRYDVIKDNTLLVDIINGHGASFVLKIINGEIYIDINVSVPFDKKIATTNKVVGVDVNIKHMLLATNILDDGNVNGYVNIYKEVINDSDFKKVCNSTVMKYFTDFSKFVTFCPLEFDFLFSRVCNQKGIYNDNSAMEKSFSDVLNKLKWNFIETGDNTKRIYIENVMKLRSQMKAYAIVKNAYYKQQSEYDFGKSEEFIQEHPFSNTDKGIEILNKLDNISKKILGCRNNIIQYSYNLFEINGYDMISLEKLTSSQFKKKPFPTVNSLLKYHKILGCTQEEMEKKDIYSVIKKGYYDIIFDNDVVTDAKLSTKGELSKFKDDFFNLMIKSIHFADIKDYFITLSNNGTAGVSLVPSYFTSQMDSIDHKIYFVQDNKSGKLKLANKHKVRSSQEKHINGLNADYNAARNIAYIMENTDCRNMFMKQSRTDKSLYNKPSYETFIKTQGSAVAKLKKEGFVKILDEASV

SEQ ID NO: 187 - protein, 746 aa, Unknown
  Description of Unknown: Cas12L_9_68454124 sequence
MASHKKTESNQIIKTFSFKIKNANGLSLDVLNDAITEYQNYYNICSDWIKDHLTMKIGELYKYIPDEKKNSGYALTLISDEWKDKPMYMMFKKGYPANNRDNAIYETLNTCNTEHYTGNILNFSDTYYRRFGYVASAISNYVTKISKMSTGSRSKNISNDSDVDTIMEQVIYEMEHNGWTSVKDWENQMEYLESKTDSNPNFVYRMTTLYEFYKSHIDEVNSKMETMSIDSLIKFGGCRRKDSKKSMYIMGGSNTPFDITQIGGNSLNIKFSKNLNVDVFGRYDVIKDNTLLVDIINGHGASFVLKIINGEIYIDINVSVPFDKKIATTNKVVGVDVNIKHMLLATNILDDGNVNGYVNIYKEVINDSDFKKVCNSTVMKYFTDFSKFVTFCPLEFDFLFSRVCNQKGIYNDNSAMEKSFSDVLNKLKWNFIETGDNTKRIYIENVMKLRSQMKAYAIVKNAYYKQQSEYDFGKSEEFIQEHPFSNTDKGIEILNKLDNISKKILGCRNNIIQYSYNLFEINGYDMISLEKLTSSQFKKKPFPTVNSLLKYHKILGCTQEEMEKKDIYSVIKKGYYDIIFDNDVVTDAKLSAKGELSKFKDDFFNLMIKSIHFADIKDYFITLSNNGTAGVSLVPSYFTSQMDSIDHKIYFVQDNKSGKLKLANKHKVRSSQEKHINGLNADYNAARNIAYIMENTECRNMFMKQSRTDKSLYNKPSYETFIKTQGSAVSKLKKDGFVKILDEASV

SEQ ID NO: 188 - protein, 782 aa, Unknown
  Description of Unknown: Cas12L_10_68605313 sequence
MMKKMRTNPHLFYICFKKIWKCHFFALSLYQLNQYIMASHKKTESNQIIKTFSFKIKNANGLSLDVLNDAITEYQNYYNICSDWIKDHLTMKIGELYKYIPDEKKNSGYALTLISDEWKDKPMYMMFKKGYPANSRDNAIYEALNTCNTEHYTGNILNFSDTYYRRFGYVASTISNYVTKISKMSTGSRSKNISNDSDVDTIMEQVIYEMEHNGWTSVKDWENQMEYLESKTDSNPNFVYRMTTLYEFYKSHIDEVNSKMETMSIDSLIKFGGCRRKDSKKSMYIMGGSNTPFDITQIGGNSLNIKFSKNLNVDVFGRYDVIKDNTLLVDIINEHGASFVLKIINDEIYIDINVSVPFDKKIATTNKVVGVDVNIKHMLLATNILDDGNVNGYVNIYKEVINDSDFKKVCNSTVMKYFTDFSKFVTFCPLEFDFLFSRVCNQKGIYNDNSAMEKSFSDVLNKLKWNFIETGDNTKRIYIENVMKLRSQMKAYAIVKNAYYKQQSEYDFGKSEEFIQEHPFSNTDKGIEILNKLDNISKKILGCRNNIIQYSYNLFEINGYDMISLEKLTSSQFKKKPFPTVNSLLKYHKILGCTQEEMEKKDIYSVIKKGYYDIIFDNDVVTDAKLSTKGELSKFKDDFFNLMIKSIHFADIKDYFITLSNNGTAGVSLVPSYFTSQMDSIDHKIYFVQDNKSGKLKLANKHKVRSSQEKHINGLNADYNAARNIAYIMENTECRNMFMKQSRTDKSLYNKPSYETFIKTQGSAVAKLKKEGFVKILDEASA

SEQ ID NO: 189 - protein, 746 aa, Unknown
  Description of Unknown: Cas12L_13_69733214 sequence
MASHKKTESNQIIKTFSFKIKNANGLSLDVLNDAITEYQNYYNICSDWIKDHLTMKIGELYKYIPDEKKNSGYALTLISDEWKDKPMYMMFKKGYPANSRDNAIYEALNTCNTEHYTGNILNFSDTYYRRFGYVASTISNYVTKISKMSTGSRSKNISNDSDVDTIMEQVIYEMEHNGWTSVKDWENQMEYLESKTDSNPNFVYRMTTLYEFYKSHIDEVNSKMETMSIDSLIKFGGCRRKDSKKSMYIMGGSNTPFDITQIGGNSLNIKFSKNLNVDVFGRYDVIKDNTLLVDIINGHGASFVLKIINGEIYIDINVSVPFDKKIATTNKVVGVDVNIKHMLLATNILDDGNVNGYVNIYKEVINDSDFKKVCNSTVMKYFTDFSKFVTFCPLEFDFLFSRVCNQKGIYNDNSAMEKSFSDVLNKLKWNFIETGDNTKRIYIENVMKLRSQMKAYAIVKNAYYKQQSEYDFGKSEEFIQEHPFSNTDKGIEILNKLDNISKKILGCRNNIIQYSYNLFEINGYDMISLEKLTSSQFEKKPFPTVNSLLKYHKILGCTQEEMEKKDIYSVIKKGYYDIIFDNDVVTDAKLSTKGELSKFKDDFFNLMIKSIHFADIKDYFITLSNNGTAGVSLVPSYFTSQMDSIDHKIYFVQDNKSGKLKLANKHKVRSSQEKHINGLNADYNAARNIAYIMENTDCRNMFMKQSRTDKSLYNKPSYETFIKTQGSAVAKLKKEGFVKILDEASV

SEQ ID NO: 190 - protein, 746 aa, Unknown
  Description of Unknown: Cas12L_15_70724743 sequence
MASHKKTESNQIIKTFSFKIKNANGLSLDVLNDAITEYQNYYNICSDWIKDHLTMKIGELYKYIPDEKKNSGYALTLISDEWKDKPMYMMFKKGYPANNRDNAIYETLNTCNTEHYTGNILNFSDTYYRRFGYVASAISNYVTKISKMSTGSRSKNISNDSDVDTIMEQVIYEMEHNGWTSVKDWENQMEYLESKTDSNPNFVYRMTTLYEFYKSHIDEVNSKMETMSIDSLIKFGGCRRKDSKKSMYIMGGSNTPFDITQIGGNSLNIKFSKNLNVDVFGRYDVIKDNTLLVDIINGHGASFVLKIINGEIYIDINVSVPFDKKIATTNKVVGVDVNIKHMLLATNILDDGNVNGYVNIYKEVINDSDFKKVCNSTVMKYFTDFSKFVTFCPLEFDFLFSRVCNQKGIYNDNSAMEKSFSDVLNKLKWNFIETGDNTKRIYIENVMKLRSQMKAYAIVKNAYYKQQSEYDFGKSEEFIQEHPFSNTDKGIEILNKLDNISKKILGCRNNIIQYSYNLFEINGYDMISLEKLTSSQFKKKPFPTVNSLLKYHKILGCTQEEMEKKDIYSVIKKGYYDIIFDNDVVTDAKLSTKGELSKFKDDFFNLMIKSIHFADIKDYFITLSNNGTAGVSLVPSYFTSQMDSIDHKIYFVQDNKSGKLKLANKHKVRSSQEKHINGLNADYNAARNIAYIMENTECRNMFMKQSRTDKSLYNKPSYETFIKTQGSAVAKLKKEGFVKILDEASV

SEQ ID NO: 191 - protein, 735 aa, Unknown
  Description of Unknown: Cas12L_16_70731038 sequence
MAHKKNIGAEIVKTYSFKVKNTNGITMEKLMNAIDEYQSYYNLCSDWICKNLTTMTIGDLDRYIPEKAKDNIYATVLLDEVWKNQPLYKIFGKKYSSNNRINALYCTLSSVIDINKKNILGLSQTYYARNGYILNVISNYASKLSKLNTGVKRHTIKETSDEATIVEQVIYEMEHNKWESIEDWKNQIEYLNSKTDYNPTYMERMKTLSAYYSEHKSEVDAKMQEMAVENLVKFGGCRRNNSKKSMFIMGSSKTTYTISYIGDNCFNINFANILNFDVYGRRDVVKNGEVLVDIMANHGDSIVLKIVNGELYADVPCSTTLNKVESTFDKVAGIDVNMKHMLLSTSVTDNGNSDFVNIYKEMSNNAEFMALCPEEDRKYYKDISQYVTFAPLELDLLFSRISKQGKVKMEKAYSEILEALKWKFFANGDNKNRIYVENIQKIRQQIKALCVIKNAYYEQQSAYDIDKTQEYIEAHPFSLTEKGMSIKSKMDNICRTIIGCRNNIIDYAYSFFERNDYSIIGLEKLTSSQFEKTKSLPTCKSLLNFHKVLGHTLSELETLPINDVVKKGYYTFTTDNEGRITDASLSEKGKVRKMKDDFFNQAIKAIHFADVKDYFATLSNNGQTGIFFVPSQFTSQMDSNTHTLYFENAKNGGLKLASKYKVRKSQEYHLNGLPADYNAARNIAYIGLDEIMRNTFLKKANSNKSLYNQPIYDTGIKKTAGVFSRMKKLKKYKVI

SEQ ID NO: 192 - protein, 746 aa, Unknown
  Description of Unknown: Cas12L_17_70959391 sequence
MASHKKTESNQIIKTFSFKIKNANGLSLDVLNDAITEYQNYYNICSDWIKDHLTMKIGELYKYIPDEKKNSGYALTLISDEWKDKPMYMMFKKGYPANSRDNAIYEALNTCNTEHYTGNILNFSDTYYRRFGYVASTISNYVTKISKMSTGSRSKNISNDSDVDTIMEQVIYEMEHNGWTSVKDWENQMEYLESKTDSNPNFVYRMTTLYEFYKSHIDEVNSKMETMSIDSLIKFGGCRRKDSKKSMYIMGGSNTPFDITQIGGNSLNIKFSKNLNVDVFGRYDVIKDNTLLVDIINGHGASFVLKIINGEIYIDINVSVPFDKKIATTNKVVGVDVNIKHMLLATNILDDGNVNGYVNIYKEVINDSDFKKVCNSTVMQYFTDFSKFVTFCPLEFDFLFSRVCNQKGIYNDNSAMEKSFSDVLNKLKWNFIETGDNTKRIYIENVMKLRSQMKAYAIVKNAYYKQQSEYDFGKSEEFIQEHPFSNTDKGIEILNKLDNISKKILGCRNNIIQYSYNLFEINGYDMISLEKLTSSQFKKKPFPTVNSLLKYHKILGCTQEEMEKKDIYSVIKKGYYDIIFDNDVVTDAKLSTKGELSKFKDDFFNLMIKSIHFADIKDYFITLSNNGTAGVSLVPSYFTSQMDSIDHKIYFVQDNKSGKLKLANKHKVRSSQEKHINGLNADYNAARNIAYIMENTECRNMFMKQSRTDKSLYNKPSYETFIKTQGSAVAKLKKEGFVKIIDEASV

SEQ ID NO: 193 - protein, 746 aa, Unknown
  Description of Unknown: Cas12L_18_71078086 sequence
MASHKKTESNQIIKTFSFKIKNANGLSLDVLNDAITEYQNYYNICSDWIKDHLTMKIGELYKYIPDEKKNSGYALTLISDEWKDKPMYMMFKKGYPANNRDNAIYEALNTCNTEHYTGNILNFSDTYYRRFGYVASTISNYVTKISKMSTGSRSKNISNDSDVDTIMEQVIYEMEHNGWTSVKDWENQMEYLESKTDSNPNFVYRMTTLYEFYKSHIDEVNSKMETMSIDSLIKFGGCRRKDSKKSMYIMGGSNTPFDITQIGGNSLNIKFSKNLNVDVFGRYDVIKDNTLLVDIINGHGASFVLKIINGEIYIDINVSVPFDKKIATTNKVVGVDVNIKHMLLATNILDDGNVNGYVNIYKEVINDSDFKKVCNSTVMKYFTDFSKFVTFCPLEFDFLFSRVCNQKGIYNDNSAMEKSFSDVLNKLKWNFIETGDNTKRIYIENVMKLRSQMKAYAIVKNAYYKQQSEYDFGKSEEFIQEHPFSNTDKGIEILNKLDNISKKILGCRNNIIQYSYNLFEINGYDMISLEKLTSSQFKKKPFPTVNSLLKYHKILGCTQEEMEKKDIYSVIKKGYYDIIFDNGVVTDAKLSTKGELSKFKDDFFNLMIKSIHFADIKDYFITLSNNGTAGVSLVPSYFTSQMDSIDHKIYFVQDNKSGKLKLANKHKVRSSQEKHINGLNADYNAARNIAYIMENTECRNMFMKQSRTDKSLYNKPSYETFIKTQGSAVAKLKKEGFVKILDEASV

SEQ ID NO: 194 - protein, 746 aa, Unknown
  Description of Unknown: Cas12L_22_71456687 sequence
MASHKKTESNQIIKTFSFKIKNANGLSLDVLNDAITEYQNYYNICSDWIKDHLTMKIGELYKYIPDEKKNSGYALTLISDEWKDKPMYMMFKKGYPANSRDNAIYEALNTCNTEHYTGNILNFSDTYYRRFGYVASAISNYVTKISKMSTGSRSKNISNDSDVDTIMEQVIYEMEHNGWTSVKDWENQMEYLESKTDSNPNFVYRMTTLYEFYKSHIDEVNSKMETMSIDSLIKFGGCRRKDSKKSMYIMGGSNTPFDITQIGGNSLNIKFSKNLNVDVFGRYDVIKDNTLLVDIINEHGASFVLKIINDEIYIDINVSVPFDKKIATTNKVVGVDVNIKHMLLATNILDDGNVNGYVNIYKEVINDSDFKKVCNSTVMKYFTDFSKFVTFCPLEFDFLFSRVCNQKGIYNDNSAMEKSFSDVLNKLKWNFIETGDNTKRIYIENVMKLRSQMKAYAIVKNAYYKQQSEYDFGKSEEFIQEHPFSNTDKGIEILNKLDNISKKILGCRNNIIQYSYNLFEINGYDMISLEKLTSSQFEKKPFPTVNSLLKYHKILGCTQEEMEKKDIYSVIKKGYYDIIFDNDVVTDAKLSTKGELSKFKDDFFNLMIKSIHFADIKDYFITLSNNGTAGVSLVPSYFTSQMDSIDHKIYFVQDNKSGKLKLANKHKVRSSQEKHINGLNADYNAARNIAYIMENTECRNMFMKQSRTDKSLYNKPSYETFIKTQGSAVAKLKKEGFVKILDEASV

SEQ ID NO: 195 - protein, 585 aa, Unknown
  Description of Unknown: Cas12L_23_71708971 sequence
DVDTIMEQVIYEMEHNGWTSVKDWENQMEYLESKTDSNPNFVYRMTTLYEFYKSHIDEVNSKMETMSIDSLIKFGGCRRKDSKKSMYIMGGSNTPFDITQIGGNSLNIKFSKNLNVDVFGRYDVIKDNTLLVDIINEHGASFVLKIINDEIYIDINVSVPFDKKIATTNKVVGVDVNIKHMLLATNILDDGNVNGYVNIYKEVINDSDFKKVCNSTVMKYFTDFSKFVTFCPLEFDFLFSRVCNQKGIYNDNSAMEKSFSDVLNKLKWNFIETGDNTKRIYIENVMKLRSQMKAYAIVKNAYYKQQSEYDFGKSEEFIQEHPFSNTDKGIEILNKLDNISKKILGCRNNIIQYSYNLFEINGYDMISLEKLTSSQFKKKPFPTVDSLLKYHKILGCTQEEMEKKDIYSVIKKGYYDIIFDNDVVTDAKLSTKGELSKFKDDFFNLMIKSIHFADIKDYFITLSNNGTAGVSLVPSYFTSQMDSIDHKIYFVQDNKSGKLKLANKHKVRSSQEKHINGLNADYNAARNIAYIMENTDCRNMFMKQSRTDKSLYNKPSYETFIKTQGSAVAKLKKEGFVKILDEASV

SEQ ID NO: 196 - protein, 500 aa, Unknown
  Description of Unknown: Cas14a.1|rifcsphigho2_02_scaffold_2167_curated|30296..31798| revcom sequence
MEVQKTVMKTLSLRILRPLYSQEIEKEIKEEKERRKQAGGTGELDGGFYKKLEKKHSEMFSFDRLNLLLNQLQREIAKVYNHAISELYIATIAQGNKSNKHYISSIVYNRAYGYFYNAYIALGICSKVEANFRSNELLTQQSALPTAKSDNFPIVLHKQKGAEGEDGGFRISTEGSDLIFEIPIPFYEYNGENRKEPYKWVKKGGQKPVLKLILSTFRRQRNKGWAKDEGTDAEIRKVTEGKYQVSQIEINRGKKLGEHQKWFANFSIEQPIYERKPNRSIVGGLDVGIRSPLVCAINNSFSRYSVDSNDVFKFSKQVFAFRRRLLSKNSLKRKGHGAAHKLEPITEMTEKNDKFRKKIIERWAKEVTNFFVKNQVGIVQIEDLSTMKDREDHFFNQYLRGFWPYYQMQTLIENKLKEYGIEVKRVQAKYTSQLCSNPNCRYWNNYFNFEYRKVNKFPKFKCEKCNLEISADYNAARNLSTPDIEKFVAKATKGINLPEK

SEQ ID NO: 197 - protein, 507 aa, Unknown
  Description of Unknown: Cas14a.2|gwa2_scaffold_18027_curated|7105..8628 sequence
MEEAKTVSKTLSLRILRPLYSAEIEKEIKEEKERRKQGGKSGELDSGFYKKLEKKHTQMFGWDKLNLMLSQLQRQIARVFNQSISELYIETVIQGKKSNKHYTSKIVYNRAYSVFYNAYLALGITSKVEANFRSTELLMQKSSLPTAKSDNFPILLHKQKGVEGEEGGFKISADGNDLIFEIPIPFYEYDSANKKEPFKWIKKGGQKPTIKLILSTFRRQRNKGWAKDEGTDAEIRKVIEGKYQVSHIEINRGKKLGDHQKWFVNFTIEQPIYERKLDKNIIGGIDVGIKSPLVCAVNNSFARYSVDSNDVLKFSKQAFAFRRRLLSKNSLKRSGHGSKNKLDPITRMTEKNDRFRKKIIERWAKEVTNFFIKNQVGTVQIEDLSTMKDRQDNFFNQYLRGFWPYYQMQNLIENKLKEYGIETKRIKARYTSQLCSNPSCRHWNSYFSFDHRKTNNFPKFKCEKCALEISADYNAARNISTPDIEKFVAKATKGINLPDKNENVILE

SEQ ID NO: 198 - protein, 529 aa, Unknown
  Description of Unknown: Cas14a.3|gwa1_scaffold_1795_curated|25635..27224|revcom sequence
MAKNTITKTLKLRIVRPYNSAEVEKIVADEKNNREKIALEKNKDKVKEACSKHLKVAAYCTTQVERNACLFCKARKLDDKFYQKLRGQFPDAVFWQEISEIFRQLQKQAAEIYNQSLIELYYEIFIKGKGIANASSVEHYLSDVCYTRAAELFKNAAIASGLRSKIKSNFRLKELKNMKSGLPTTKSDNFPIPLVKQKGGQYTGFEISNHNSDFIIKIPFGRWQVKKEIDKYRPWEKFDFEQVQKSPKPISLLLSTQRRKRNKGWSKDEGTEAEIKKVMNGDYQTSYIEVKRGSKIGEKSAWMLNLSIDVPKIDKGVDPSIIGGIDVGVKSPLVCAINNAFSRYSISDNDLFHFNKKMFARRRILLKKNRHKRAGHGAKNKLKPITILTEKSERFRKKLIERWACEIADFFIKNKVGTVQMENLESMKRKEDSYFNIRLRGFWPYAEMQNKIEFKLKQYGIEIRKVAPNNTSKTCSKCGHLNNYFNFEYRKKNKFPHFKCEKCNFKENADYNAALNISNPKLKSTKEEP

SEQ ID NO: 199 - protein, 726 aa, Unknown
  Description of Unknown: Cas14a.4|CG10_big_fil_rev_8_21_14_0.10_scaffold_20906_curated| 649..2829 sequence
MERQKVPQIRKIVRVVPLRILRPKYSDVIENALKKFKEKGDDTNTNDFWRAIRDRDTEFFRKELNFSEDEINQLERDTLFRVGLDNRVLFSYFDFLQEKLMKDYNKIISKLFINRQSKSSFENDLTDEEVEELIEKDVTPFYGAYIGKGIKSVIKSNLGGKFIKSVKIDRETKKVTKLTAINIGLMGLPVAKSDTFPIKIIKTNPDYITFQKSTKENLQKIEDYETGIEYGDLLVQITIPWFKNENKDFSLIKTKEAIEYYKLNGVGKKDLLNINLVLTTYHIRKKKSWQIDGSSQSLVREMANGELEEKWKSFFDTFIKKYGDEGKSALVKRRVNKKSRAKGEKGRELNLDERIKRLYDSIKAKSFPSEINLIPENYKWKLHFSIEIPPMVNDIDSNLYGGIDFGEQNIATLCVKNIEKDDYDFLTIYGNDLLKHAQASYARRRIMRVQDEYKARGHGKSRKTKAQEDYSERMQKLRQKITERLVKQISDFFLWRNKFHMAVCSLRYEDLNTLYKGESVKAKRMRQFINKQQLFNGIERKLKDYNSEIYVNSRYPHYTSRLCSKCGKLNLYFDFLKFRTKNIIIRKNPDGSEIKYMPFFICEFCGWKQAGDKNASANIADKDYQDKLNKEKEFCNIRKPKSKKEDIGEENEEERDYSRRFNRNSFIYNSLKKDNKLNQEKLFDEWKNQLKRKIDGRNKFEPKEYKDRFSYLFAYYQEIIKNESES

SEQ ID NO: 200 - protein, 517 aa, Unknown
  Description of Unknown: Cas14a.5|rifcsplowo2_01_scaffold_34461_curated|4968..6521 sequence
MVPTELITKTLQLRVIRPLYFEEIEKELAELKEQKEKEFEETNSLLLESKKIDAKSLKKLKRKARSSAAVEFWKIAKEKYPDILTKPEMEFIFSEMQKMMARFYNKSMTNIFIEMNNDEKVNPLSLISKASTEANQVIKCSSISSGLNRKIAGSINKTKFKQVRDGLISLPTARTETFPISFYKSTANKDEIPISKINLPSEEEADLTITLPFPFFEIKKEKKGQKAYSYFNIIEKSGRSNNKIDLLLSTHRRQRRKGWKEEGGTSAEIRRLMEGEFDKEWEIYLGEAEKSEKAKNDLIKNMTRGKLSKDIKEQLEDIQVKYFSDNNVESWNDLSKEQKQELSKLRKKKVEELKDWKHVKEILKTRAKIGWVELKRGKRQRDRNKWFVNITITRPPFINKELDDTKFGGIDLGVKVPFVCAVHGSPARLIIKENEILQFNKMVSARNRQITKDSEQRKGRGKKNKFIKKEIFNERNELFRKKIIERWANQIVKFFEDQKCATVQIENLESFDRTSYK

SEQ ID NO: 201 - protein, 481 aa, Unknown
  Description of Unknown: Cas14a.6|3300012359.a|Ga0137385_10000156|41289..42734 sequence
MKSDTKDKKIIIHQTKTLSLRIVKPQSIPMEEFTDLVRYHQMIIFPVYNNGAIDLYKKLFKAKIQKGNEARAIKYFMNKIVYAPIANTVKNSYIALGYSTKMQSSFSGKRLWDLRFGEATPPTIKADFPLPFYNQSGFKVSSENGEFIIGIPFGQYTKKTVSDIEKKTSFAWDKFTLEDTTKKTLIELLLSTKTRKMNEGWKNNEGTEAEIKRVMDGTYQVTSLEILQRDDSWFVNFNIAYDSLKKQPDRDKIAGIHMGITRPLTAVIYNNKYRALSIYPNTVMHLTQKQLARIKEQRTNSKYATGGHGRNAKVTGTDTLSEAYRQRRKKIIEDWIASIVKFAINNEIGTIYLEDISNTNSFFAAREQKLIYLEDISNTNSFLSTYKYPISAISDTLQHKLEEKAIQVIRKKAYYVNQICSLCGHYNKGFTYQFRRKNKFPKMKCQGCLEATSTEFNAAANVANPDYEKLLIKHGLLQLKK

SEQ ID NO: 202 - protein, 613 aa, Unknown
  Description of Unknown: Cas14b.10|CG08_land_8_20_14_0.20_scaffold_1609_curated| 6134..7975 sequence
MISLKLKLLPDEEQKKLLDEMFWKWASICTRVGFGRADKEDLKPPKDAEGVWFSLTQLNQANTDINDLREAMKHQKHRLEYEKNRLEAQRDDTQDALKNPDRREISTKRKDLFRPKASVEKGFLKLKYHQERYWVRRLKEINKLIERKTKTLIKIEKGRIKFKATRITLHQGSFKIRFGDKPAFLIKALSGKNQIDAPFVVVPEQPICGSVVNSKKYLDEITTNFLAYSVNAMLFGLSRSEEMLLKAKRPEKIKKKEEKLAKKQSAFENKKKELQKLLGRELTQQEEAIIEETRNQFFQDFEVKITKQYSELLSKIANELKQKNDFLKVNKYPILLRKPLKKAKSKKINNLSPSEWKYYLQFGVKPLLKQKSRRKSRNVLGIDRGLKHLLAVTVLEPDKKTFVWNKLYPNPITGWKWRRRKLLRSLKRLKRRIKSQKHETIHENQTRKKLKSLQGRIDDLLHNISRKIVETAKEYDAVIVVEDLQSMRQHGRSKGNRLKTLNYALSLFDYANVMQLIKYKAGIEGIQIYDVKPAGTSQNCAYCLLAQRDSHEYKRSQENSKIGVCLNPNCQNHKKQIDADLNAARVIASCYALKINDSQPFGTRKRFKKRTTN

SEQ ID NO: 203 - protein, 615 aa, Unknown
  Description of Unknown: Cas14b.11|CG_4_10_14_0.8_um_filter_scaffold_20762_curated| 1372..3219 sequence
METLSLKLKLNPSKEQLLVLDKMFWKWASICTRLGLKKAEMSDLEPPKDAEGVWFSKTQLNQANTDVNDLRKAMQHQGKRIEYELDKVENRRNEIQEMLEKPDRRDISPNRKDLFRPKAAVEKGYLKLKYHKLGYWSKELKTANKLIERKRKTLAKIDAGKMKFKPTRISLHTNSFRIKFGEEPKIALSTTSKHEKIELPLITSLQRPLKTSCAKKSKTYLDAAILNFLAYSTNAALFGLSRSEEMLLKAKKPEKIEKRDRKLATKRESFDKKLKTLEKLLERKLSEKEKSVFKRKQTEFFDKFCITLDETYVEALHRIAEELVSKNKYLEIKKYPVLLRKPESRLRSKKLKNLKPEDWTYYIQFGFQPLLDTPKPIKTKTVLGIDRGVRHLLAVSIFDPRTKTFTFNRLYSNPIVDWKWRRRKLLRSIKRLKRRLKSEKHVHLHENQFKAKLRSLEGRIEDHFHNLSKEIVDLAKENNSVIVVENLGGMRQHGRGRGKWLKALNYALSHFDYAKVMQLIKYKAELAGVFVYDVAPAGTSINCAYCLLNDKDASNYTRGKVINGKKNTKIGECKTCKKEFDADLNAARVIALCYEKRLNDPQPFGTRKQFKPKKP

SEQ ID NO: 204 - protein, 775 aa, Unknown
  Description of Unknown: Cas14b.12|CG22_combo_CG10-13_8_21_14_all_scaffold_2003_curated| 553..2880|revcom sequence
MKALKLQLIPTRKQYKILDEMFWKWASLANRVSQKGESKETLAPKKDIQKIQFNATQLNQIEKDIKDLRGAMKEQQKQKERLLLQIQERRSTISEMLNDDNNKERDPHRPLNFRPKGWRKFHTSKHWVGELSKILRQEDRVKKTIERIVAGKISFKPKRIGIWSSNYKINFFKRKISINPLNSKGFELTLMTEPTQDLIGKNGGKSVLNNKRYLDDSIKSLLMFALHSRFFGLNNTDTYLLGGKINPSLVKYYKKNQDMGEFGREIVEKFERKLKQEINEQQKKIIMSQIKEQYSNRDSAFNKDYLGLINEFSEVFNQRKSERAEYLLDSFEDKIKQIKQEIGESLNISDWDFLIDEAKKAYGYEEGFTEYVYSKRYLEILNKIVKAVLITDIYFDLRKYPILLRKPLDKIKKISNLKPDEWSYYIQFGYDSINPVQLMSTDKFLGIDRGLTHLLAYSVFDKEKKEFIINQLEPNPIMGWKWKLRKVKRSLQHLERRIRAQKMVKLPENQMKKKLKSIEPKIEVHYHNISRKIVNLAKDYNASIVVESLEGGGLKQHGRKKNARNRSLNYALSLFDYGKIASLIKYKADLEGVPMYEVLPAYTSQQCAKCVLEKGSFVDPEIIGYVEDIGIKGSLLDSLFEGTELSSIQVLKKIKNKIELSARDNHNKEINLILKYNFKGLVIVRGQDKEEIAEHPIKEINGKFAILDFVYKRGKEKVGKKGNQKVRYTGNKKVGYCSKHGQVDADLNASRVIALCKYLDINDPILFGEQRKSFK

SEQ ID NO: 205 - protein, 777 aa, Unknown
  Description of Unknown: Cas14b.13|rifcsphigho2_01_scaffold_82367_curated|1523..3856| revcom sequence
MVTRAIKLKLDPTKNQYKLLNEMFWKWASLANRFSQKGASKETLAPKDGTQKIQFNATQLNQIKKDVDDLRGAMEKQGKQKERLLIQIQERLLTISEILRDDSKKEKDPHRPQNFRPFGWRRFHTSAYWSSEASKLTRQVDRVRRTIERIKAGKINFKPKRIGLWSSTYKINFLKKKINISPLKSKSFELDLITEPQQKIIGKEGGKSVANSKKYLDDSIKSLLIFAIKSRLFGLNNKDKPLFENIITPNLVRYHKKGQEQENFKKEVIKKFENKLKKEISQKQKEIIFSQIERQYENRDATFSEDYLRAISEFSEIFNQRKKERAKELLNSFNEKIRQLKKEVNGNISEEDLKILEVEAEKAYNYENGFIEWEYSEQFLGVLEKIARAVLISDNYFDLKKYPILIRKPTNKSKKITNLKPEEWDYYIQFGYGLINSPMKIETKNFMGIDRGLTHLLAYSIFDRDSEKFTINQLELNPIKGWKWKLRKVKRSLQHLERRMRAQKGVKLPENQMKKRLKSIEPKIESYYHNLSRKIVNLAKANNASIVVESLEGGGLKQHGRKKNSRHRALNYALSLFDYGKIASLIKYKSDLEGVPMYEVLPAYTSQQCAKCVLKKGSFVEPEIIGYIEEIGFKENLLTLLFEDTGLSSVQVLKKSKNKMTLSARDKEGKMVDLVLKYNFKGLVISQEKKKEEIVEFPIKEIDGKFAVLDSAYKRGKERISKKGNQKLVYTGNKKVGYCSVHGQVDADLNASRVIALCKYLGINEPIVFGEQRKSFK

SEQ ID NO: 206 - protein, 610 aa, Unknown
  Description of Unknown: Cas14b.14|gwc1_scaffold_8732_curated|2705..4537 sequence
LDLITEPIQPHKSSSLRSKEFLEYQISDFLNFSLHSLFFGLASNEGPLVDFKIYDKIVIPKPEERFPKKESEEGKKLDSFDKRVEEYYSDKLEKKIERKLNTEEKNVIDREKTRIWGEVNKLEEIRSIIDEINEIKKQKHISEKSKLLGEKWKKVNNIQETLLSQEYVSLISNLSDELTNKKKELLAKKYSKFDDKIKKIKEDYGLEFDENTIKKEGEKAFLNPDKFSKYQFSSSYLKLIGEIARSLITYKGFLDLNKYPIIFRKPINKVKKIHNLEPDEWKYYIQFGYEQINNPKLETENILGIDRGLTHILAYSVFEPRSSKFILNKLEPNPIEGWKWKLRKLRRSIQNLERRWRAQDNVKLPENQMKKNLRSIEDKVENLYHNLSRKIVDLAKEKNACIVFEKLEGQGMKQHGRKKSDRLRGLNYKLSLFDYGKIAKLIKYKAEIEGIPIYRIDSAYTSQNCAKCVLESRRFAQPEEISCLDDFKEGDNLDKRILEGTGLVEAKIYKKLLKEKKEDFEIEEDIAMFDTKKVIKENKEKTVILDYVYTRRKEIIGTNHKKNIKGIAKYTGNTKIGYCMKHGQVDADLNASRTIALCKNFDINNPEIWK

SEQ ID NO: 207 - protein, 632 aa, Unknown
  Description of Unknown: Cas14b.15|3300010293.a|Ga0116204_1008574|2134..4032 sequence
MSDESLVSSEDKLAIKIKIVPNAEQAKMLDEMFKKWSSICNRISRGKEDIETLRPDEGKELQFNSTQLNSATMDVSDLKKAMARQGERLEAEVSKLRGRYETIDASLRDPSRRHTNPQKPSSFYPSDWDISGRLTPRFHTARHYSTELRKLKAKEDKMLKTINKIKNGKIVFKPKRITLWPSSVNMAFKGSRLLLKPFANGFEMELPIVISPQKTADGKSQKASAEYMRNALLGLAGYSINQLLFGMNRSQKMLANAKKPEKVEKFLEQMKNKDANFDKKIKALEGKWLLDRKLKESEKSSIAVVRTKFFKSGKVELNEDYLKLLKHMANEILERDGFVNLNKYPILSRKPMKRYKQKNIDNLKPNMWKYYIQFGYEPIFERKASGKPKNIMGIDRGLTHLLAVAVFSPDQQKFLFNHLESNPIMHWKWKLRKIRRSIQHMERRIRAEKNKHIHEAQLKKRLGSIEEKTEQHYHIVSSKIINWAIEYEAAIVLESLSHMKQRGGKKSVRTRALNYALSLFDYEKVARLITYKARIRGIPVYDVLPGMTSKTCATCLLNGSQGAYVRGLETTKAAGKATKRKNMKIGKCMVCNSSENSMIDADLNAARVIAICKYKNLNDPQPAGSRKVFKRF

SEQ ID NO: 208 - protein, 625 aa, Unknown
  Description of Unknown: Cas14b.16|3300005573.a|Ga0078972_1001015a|33750..35627 sequence
MLALKLKIMPTEKQAEILDAMFWKWASICSRIAKMKKKVSVKENKKELSKKIPSNSDIWFSKTQLCQAEVDVGDHKKALKNFEKRQESLLDELKYKVKAINEVINDESKREIDPNNPSKFRIKDSTKKGNLNSPKFFTLKKWQKILQENEKRIKKKESTIEKLKRGNIFFNPTKISLHEEEYSINFGSSKLLLNCFYKYNKKSGINSDQLENKFNEFQNGLNIICSPLQPIRGSSKRSFEFIRNSIINFLMYSLYAKLFGIPRSVKALMKSNKDENKLKLEEKLKKKKSSFNKTVKEFEKMIGRKLSDNESKILNDESKKFFEIIKSNNKYIPSEEYLKLLKDISEEIYNSNIDFKPYKYSILIRKPLSKFKSKKLYNLKPTDYKYYLQLSYEPFSKQLIATKTILGIDRGLKHLLAVSVFDPSQNKFVYNKLIKNPVFKWKKRYHDLKRSIRNRERRIRALTGVHIHENQLIKKLKSMKNKINVLYHNVSKNIVDLAKKYESTIVLERLENLKQHGRSKGKRYKKLNYVLSNFDYKKIESLISYKAKKEGVPVSNINPKYTSKTCAKCLLEVNQLSELKNEYNRDSKNSKIGICNIHGQIDADLNAARVIALCYSKNLNEPHFK

SEQ ID NO: 209 - protein, 534 aa, Unknown
  Description of Unknown: Cas14b.1|rifcsplowo2_01_scaffold_239_curated|54653..56257 sequence
LKLSEQENITTGVKFKLKLDKETSEGLNDYFDEYGKAINFAIKVIQKELAEDRFAGKVRLDENKKPLLNEDGKKIWDFPNEFCSCGKQVNRYVNGKSLCQECYKNKFTEYGIRKRMYSAKGRKAEQDINIKNSTNKISKTHFNYAIREAFILDKSIKKQRKERFRRLREMKKKLQEFIEIRDGNKILCPKIEKQRVERYIHPSWINKEKKLEDFRGYSMSNVLGKIKILDRNIKREEKSLKEKGQINFKARRLMLDKSVKFLNDNKISFTISKNLPKEYELDLPEKEKRLNWLKEKIKIIKNQKPKYAYLLRKDDNFYLQYTLETEFNLKEDYSGIVGIDRGVSHIAVYTFVHNNGKNERPLFLNSSEILRLKNLQKERDRFLRRKHNKKRKKSNMRNIEKKIQLILHNYSKQIVDFAKNKNAFIVFEKLEKPKKNRSKMSKKSQYKLSQFTFKKLSDLVDYKAKREGIKVLYISPEYTSKECSHCGEKVNTQRPFNGNSSLFKCNKCGVELNADYNASINIAKKGLNILNSTN

SEQ ID NO: 210 - protein, 537 aa, Unknown
  Description of Unknown: Cas14b.2|rifcsplowo2_01_scaffold_282_curated|77370..78983 sequence
MEESIITGVKFKLRIDKETTKKLNEYFDEYGKAINFAVKIIQKELADDRFAGKAKLDQNKNPILDENGKKIYEFPDEFCSCGKQVNKYVNNKPFCQECYKIRFTENGIRKRMYSAKGRKAEHKINILNSTNKISKTHFNYAIREAFILDKSIKKQRKKRNERLRESKKRLQQFIDMRDGKREICPTIKGQKVDRFIHPSWITKDKKLEDFRGYTLSIINSKIKILDRNIKREEKSLKEKGQIIFKAKRLMLDKSIRFVGDRKVLFTISKTLPKEYELDLPSKEKRLNWLKEKIEIIKNQKPKYAYLLRKNIESEKKPNYEYYLQYTLEIKPELKDFYDGAIGIDRGINHIAVCTFISNDGKVTPPKFFSSGEILRLKNLQKERDRFLLRKHNKNRKKGNMRVIENKINLILHRYSKQIVDMAKKLNASIVFEELGRIGKSRTKMKKSQRYKLSLFIFKKLSDLVDYKSRREGIRVTYVPPEYTSKECSHCGEKVNTQRPFNGNYSLFKCNKCGIQLNSDYNASINIAKKGLKIPNST

SEQ ID NO: 211 - protein, 541 aa, Unknown
  Description of Unknown: Cas14b.3|rifcsphigho2_01_scaffold_36781_curated|2592..4217 sequence
LWTIVIGDFIEMPKQDLVTTGIKFKLDVDKETRKKLDDYFDEYGKAINFAVKIIQKNLKEDRFAGKIALGEDKKPLLDKDGKKIYNYPNESCSCGNQVRRYVNAKPFCVDCYKLKFTENGIRKRMYSARGRKADSDINIKNSTNKISKTHFNYAIREGFILDKSLKKQRSKRIKKLLELKRKLQEFIDIRQGQMVLCPKIKNQRVDKFIHPSWLKRDKKLEEFRGYSLSVVEGKIKIFNRNILREEDSLRQRGHVNFKANRIMLDKSVRFLDGGKVNFNLNKGLPKEYLLDLPKKENKLSWLNEKISLIKLQKPKYAYLLRREGSFFIQYTIENVPKTFSDYLGAIGIDRGISHIAVCTFVSKNGVNKAPVFFSSGEILKLKSLQKQRDLFLRGKHNKIRKKSNMRNIDNKINLILHKYSRNIVNLAKSEKAFIVFEKLEKIKKSRFKMSKSLQYKLSQFTFKKLSDLVEYKAKIEGIKVDYVPPEYTSKECSHCGEKVDTQRPFNGNSSLFKCNKCRVQLNADYNASINIAKKSLNISNN

SEQ ID NO: 212 - protein, 542 aa, Unknown
  Description of Unknown: Cas14b.4|cg1_0.2_scaffold_785_c_curated|32521..34155 sequence
MSKTTISVKLKIIDLSSEKKEFLDNYFNEYAKATTFCQLRIRRLLRNTHWLGKKEKSSKKWIFESGICDLCGENKELVNEDRNSGEPAKICKRCYNGRYGNQMIRKLFVSTKKREVQENMDIRRVAKLNNTHYHRIPEEAFDMIKAADTAEKRRKKNVEYDKKRQMEFIEMFNDEKKRAARPKKPNERETRYVHISKLESPSKGYTLNGIKRKIDGMGKKIERAEKGLSRKKIFGYQGNRIKLDSNWVRFDLAESEITIPSLFKEMKLRITGPTNVHSKSGQIYFAEWFERINKQPNNYCYLIRKTSSNGKYEYYLQYTYEAEVEANKEYAGCLGVDIGCSKLAAAVYYDSKNKKAQKPIEIFTNPIKKIKMRREKLIKLLSRVKVRHRRRKLMQLSKTEPIIDYTCHKTARKIVEMANTAKAFISMENLETGIKQKQQARETKKQKFYRNMFLFRKLSKLIEYKALLKGIKIVYVKPDYTSQTCSSCGADKEKTERPSQAIFRCLNPTCRYYQRDINADFNAAVNIAKKALNNTEVVTTLL

SEQ ID NO: 213 - protein, 564 aa, Unknown
  Description of Unknown: Cas14b.5|rifcsphigho2_02_scaffold_55589_curated|1904..3598 sequence
MARAKNQPYQKLTTTTGIKFKLDLSEEEGKRFDEYFSEYAKAVNFCAKVIYQLRKNLKFAGKKELAAKEWKFEISNCDFCNKQKEIYYKNIANGQKVCKGCHRTNFSDNAIRKKMIPVKGRKVESKFNIHNTTKKISGTHRHWAFEDAADIIESMDKQRKEKQKRLRREKRKLSYFFELFGDPAKRYELPKVGKQRVPRYLHKIIDKDSLTKKRGYSLSYIKNKIKISERNIERDEKSLRKASPIAFGARKIKMSKLDPKRAFDLENNVFKIPGKVIKGQYKFFGTNVANEHGKKFYKDRISKILAGKPKYFYLLRKKVAESDGNPIFEYYVQWSIDTETPAITSYDNILGIDAGITNLATTVLIPKNLSAEHCSHCGNNHVKPIFTKFFSGKELKAIKIKSRKQKYFLRGKHNKLVKIKRIRPIEQKVDGYCHVVSKQIVEMAKERNSCIALEKLEKPKKSKFRQRRREKYAVSMFVFKKLATFIKYKAAREGIEIIPVEPEGTSYTCSHCKNAQNNQRPYFKPNSKKSWTSMFKCGKCGIELNSDYNAAFNIAQKALNMTSA

SEQ ID NO: 214 - protein, 610 aa, Unknown
  Description of Unknown: Cas14b.6|CG03_land_8_20_14_0.80_scaffold_2214_curated|6634..8466| revcom sequence
MDEKHFFCSYCNKELKISKNLINKISKGSIREDEAVSKAISIHNKKEHSLILGIKFKLFIENKLDKKKLNEYFDNYSKAVTFAARIFDKIRSPYKFIGLKDKNTKKWTFPKAKCVFCLEEKEVAYANEKDNSKICTECYLKEFGENGIRKKIYSTRGRKVEPKYNIFNSTKELSSTHYNYAIRDAFQLLDALKKQRQKKLKSIFNQKLRLKEFEDIFSDPQKRIELSLKPHQREKRYIHLSKSGQESINRGYTLRFVRGKIKSLTRNIEREEKSLRKKTPIHFKGNRLMIFPAGIKFDFASNKVKISISKNLPNEFNFSGTNVKNEHGKSFFKSRIELIKTQKPKYAYVLRKIKREYSKLRNYEIEKIRLENPNADLCDFYLQYTIETESRNNEEINGIIGIDRGITNLACLVLLKKGDKKPSGVKFYKGNKILGMKIAYRKHLYLLKGKRNKLRKQRQIRAIEPKINLILHQISKDIVKIAKEKNFAIALEQLEKPKKARFAQRKKEKYKLALFTFKNLSTLIEYKSKREGIPVIYVPPEKTSQMCSHCAINGDEHVDTQRPYKKPNAQKPSYSLFKCNKCGIELNADYNAAFNIAQKGLKTLMLNHSH

SEQ ID NO: 215 - protein, 552 aa, Unknown
  Description of Unknown: Cas14b.7|3300013125.a|Ga0172369_10000737|994..2652|revcom sequence
MDEEPDSAEPNLAPISVKLKLVKLDGEKLAALNDYFNEYAKAVNFCELKMQKIRKNLVNIRGTYLKEKKAWINQTGECCICKKIDELRCEDKNPDINGKICKKCYNGRYGNQMIRKLFVSTNKRAVPKSLDIRKVARLHNTHYHRIPPEAADIIKAIETAERKRRNRILFDERRYNELKDALENEEKRVARPKKPKEREVRYVPISKKDTPSKGYTMNALVRKVSGMAKKIERAKRNLNKRKKIEYLGRRILLDKNWVRFDFDKSEISIPTMKEFFGEMRFEITGPSNVMSPNGREYFTKWFDRIKAQPDNYCYLLRKESEDETDFYLQYTWRPDAHPKKDYTGCLGIDIGGSKLASAVYFDADKNRAKQPIQIFSNPIGKWKTKRQKVIKVLSKAAVRHKTKKLESLRNIEPRIDVHCHRIARKIVGMALAANAFISMENLEGGIREKQKAKETKKQKFSRNMFVFRKLSKLIEYKALMEGVKVVYIVPDYTSQLCSSCGTNNTKRPKQAIFMCQNTECRYFGKNINADFNAAINIAKKALNRKDIVRELS

SEQ ID NO: 216 - protein, 534 aa, Unknown
  Description of Unknown: Cas14b.8|3300013125.a|Ga0172369_10010464|885..2489|revcom sequence
MEKNNSEQTSITTGIKFKLKLDKETKEKLNNYFDEYGKAINFAVRIIQMQLNDDRLAGKYKRDEKGKPILGEDGKKILEIPNDFCSCGNQVNHYVNGVSFCQECYKKRFSENGIRKRMYSAKGRKAEQDINIKNSTNKISKTHFNYAIREAFNLDKSIKKQREKRFKKLKDMKRKLQEFLEIRDGKRVICPKIEKQKVERYIHPSWINKEKKLEEFRGYSLSIVNSKIKSFDRNIQREEKSLKEKGQINFKAQRLMLDKSVKFLKDNKVSFTISKELPKTFELDLPKKEKKLNWLNEKLEIIKNQKPKYAYLLRKENNIFLQYTLDSIPEIHSEYSGAVGIDRGVSHIAVYTFLDKDGKNERPFFLSSSGILRLKNLQKERDKFLRKKHNKIRKKGNMRNIEQKINLILHEYSKQIVNFAKDKNAFIVFELLEKPKKSRERMSKKIQYKLSQFTFKKLSDLVDYKAKREGIKVIYVEPAYTSKDCSHCGERVNTQRPFNGNFSLFKCNKCGIVLNSDYNASLNIARKGLNISAN

SEQ ID NO: 217 - protein, 577 aa, Unknown
  Description of Unknown: Cas14b.9|3300013127.a|Ga0172365_10004421|633..2366|revcom sequence
MAEEKFFFCEKCNKDIKIPKNYINKQGAEEKARAKHEHRVHALILGIKFKIYPKKEDISKLNDYFDEYAKAVTFTAKIVDKLKAPFLFAGKRDKDTSKKKWVFPVDKCSFCKEKTEINYRTKQGKNICNSCYLTEFGEQGLLEKIYATKGRKVSSSFNLFNSTKKLTGTHNNYVVKESLQLLDALKKQRSKRLKKLSNTRRKLKQFEEMFEKEDKRFQLPLKEKQRELRFIHVSQKDRATEFKGYTMNKIKSKIKVLRRNIEREQRSLNRKSPVFFRGTRIRLSPSVQFDDKDNKIKLTLSKELPKEYSFSGLNVANEHGRKFFAEKLKLIKENKSKYAYLLRRQVNKNNKKPIYDYYLQYTVEFLPNIITNYNGILGIDRGINTLACIVLLENKKEKPSFVKFFSGKGILNLKNKRRKQLYFLKGVHNKYRKQQKIRPIEPRIDQILHDISKQIIDLAKEKRVAISLEQLEKPQKPKFRQSRKAKYKLSQFNFKTLSNYIDYKAKKEGIRVIYIAPEMTSQNCSRCAMKNDLHVNTQRPYKNTSSLFKCNKCGVELNADYNAAFNIAQKGLKILNS

SEQ ID NO: 218 - protein, 517 aa, Unknown
  Description of Unknown: Cas14c.1|CG10_big_fil_rev_8_21_14_0.10_scaffold_4477_curated| 19327..20880|revcom sequence
VINLFGYKFALYPNKTQEELLNKHLGECGWLYNKAIEQNEYYKADSNIEEAQKKFELLPDKNSDEAKVLRGNISKDNYVYRTLVKKKKSEINVQIRKAVVLRPAETIRNLAKVKKKGLSVGRLKFIPIREWDVLPFKQSDQIRLEENYLILEPYGRLKFKMHRPLLGKPKTFCIKRTATDRWTISFSTEYDDSNMRKNDGGQVGIDVGLKTHLRLSNENPDEDPRYPNPKIWKRYDRRLTILQRRISKSKKLGKNRTRLRLRLSRLWEKIRNSRADLIQNETYEILSENKLIAIEDLNVKGMQEKKDKKGRKGRTRAQEKGLHRSISDAAFSEFRRVLEYKAKRFGSEVKPVSAIDSSKECHNCGNKKGMPLESRIYECPKCGLKIDRDLNSAKVILARATGVRPGSNARADTKISATAGASVQTEGTVSEDFRQQMETSDQKPMQGEGSKEPPMNPEHKSSGRGSKHVNIGCKNKVGLYNEDENSRSTEKQIMDENRSTTEDMVEIGALHSPVLTT

SEQ ID NO: 219 - protein, 410 aa, Unknown
  Description of Unknown: Cas14c.2|3300001245.a|JGI12048J13642_10201286|4257..5489| revcom sequence
MIASIDYEAVSQALIVFEFKAKGKDSQYQAIDEAIRSYRFIRNSCLRYWMDNKKVGKYDLNKYCKVLAKQYPFANKLNSQARQSAAECSWSAISRFYDNCKRKVSGKKGFPKFKKHARSVEYKTSGWKLSENRKAITFTDKNGIGKLKLKGTYDLHFSQLEDMKRVRLVRRADGYYVQFCISVDVKVETEPTGKAIGLDVGIKYFLADSSGNTIENPQFYRKAEKKLNRANRRKSKKYIRGVKPQSKNYHKARCRYARKHLRVSRQRKEYCKRVAYCVIHSNDVVAYEDLNVKGMVKNRHLAKSISDVAWSTFRHWLEYFAIKYGKLTIPVAPHNTSQNCSNCDKKVPKSLSTRTHICHHCGYSEDRDVNAAKNILKKALSTVGQTGSLKLGEIEPLLVLEQSCTRKFDL

SEQ ID NO: 220 - protein, 602 aa, Unknown
  Description of Unknown: Cas14d.1|RIFCSPHIGHO2_01_FULL_CPR_46_36_rifcsphigho2_01_scaffold _646_curated|49808..51616|revcom sequence
MSQSLLKWHDMAGRDKDASRSLQKSAVEGVLLHLTASHRVALEMLEKSVSQTVAVTMEAAQQRLVIVLEDDPTKATSRKRVISADLQFTREEFGSLPNWAQKLASTCPEIATKYADKHINSIRIAWGVAKESTNGDAVEQKLQWQIRLLDVTMFLQQLVLQLADKALLEQIPSSIRGGIGQEVAQQVTSHIQLLDSGTVLKAELPTISDRNSELARKQWEDAIQTVCTYALPFSRERARILDPGKYAAEDPRGDRLINIDPMWARVLKGPTVKSLPLLFVSGSSIRIVKLTLPRKHAAGHKHTFTATYLVLPVSREWINSLPGTVQEKVQWWKKPDVLATQELLVGKGALKKSANTLVIPISAGKKRFFNHILPALQRGFPLQWQRIVGRSYRRPATHRKWFAQLTIGYTNPSSLPEMALGIHFGMKDILWWALADKQGNILKDGSIPGNSILDFSLQEKGKIERQQKAGKNVAGKKYGKSLLNATYRVVNGVLEFSKGISAEHASQPIGLGLETIRFVDKASGSSPVNARHSNWNYGQLSGIFANKAGPAGFSVTEITLKKAQRDLSDAEQARVLAIEATKRFASRIKRLATKRKDDTLFV

SEQ ID NO: 221 - protein, 494 aa, Unknown
  Description of Unknown: Cas14d.2|rifcsphigho2_01_scaffold_10981_curated|5762..7246|revcom sequence
VEPVEKERFYYRTYTFRLDGQPRTQNLTTQSGWGLLTKAVLDNTKHYWEIVHHARIANQPIVFENPVIDEQGNPKLNKLGQPRFWKRPISDIVNQLRALFENQNPYQLGSSLIQGTYWDVAENLASWYALNKEYLAGTATWGEPSFPEPHPLTEINQWMPLTFSSGKVVRLLKNASGRYFIGLPILGENNPCYRMRTIEKLIPCDGKGRVTSGSLILFPLVGIYAQQHRRMTDICESIRTEKGKLAWAQVSIDYVREVDKRRRMRRTRKSQGWIQGPWQEVFILRLVLAHKAPKLYKPRCFAGISLGPKTLASCVILDQDERVVEKQQWSGSELLSLIHQGEERLRSLREQSKPTWNAAYRKQLKSLINTQVFTIVTFLRERGAAVRLESIARVRKSTPAPPVNFLLSHWAYRQITERLKDLAIRNGMPLTHSNGSYGVRFTCSQCGATNQGIKDPTKYKVDIESETFLCSICSHREIAAVNTATNLAKQLLDE

SEQ ID NO: 222 - protein, 649 aa, Unknown
  Description of Unknown: Cas14d.3|RIFCSPLOWO2_01_FULL_OD1_45_34b_rifcsplowo2_01_scaffold _3495_curated|25656..27605|revcom sequence
MNDTETSETLTSHRTVCAHLHVVGETGSLPRLVEAALAELITLNGRATQALLSLAKNGLVLRRDKEENLIAAELTLPCRKNKYADVAAKAGEPILATRINNKGKLVTKKWYGEGNSYHIVRFTPETGMFTVRVFDRYAFDEELLHLHSEVVFGSDLPKGIKAKTDSLPANFLQAVFTSFLELPFQGFPDIVVKPAMKQAAEQLLSYVQLEAGENQQAEYPDTNERDPELRLVEWQKSLHELSVRTEPFEFVRARDIDYYAETDRRGNRFVNITPEWTKFAESPFARRLPLKIPPEFCILLRRKTEGHAKIPNRIYLGLQIFDGVTPDSTLGVLATAEDGKLFWWHDHLDEFSNLEGKPEPKLKNKPQLLMVSLEYDREQRFEESVGGDRKICLVTLKETRNFRRGRHGHTRTDRLPAGNTLWRADFATSAEVAAPKWNGRILGIHFQHNPVITWALMDHDAEVLEKGFIEGNAFLGKALDKQALNEYLQKGGKWVGDRSFGNKLKGITHTLASLIVRLAREKDAWIALEEISWVQKQSADSVANRRFSMWNYSRLATLIEWLGTDIATRDCGTAAPLAHKVSDYLTHFTCPECGACRKAGQKKEIADTVRAGDILTCRKCGFSGPIPDNFIAEFVAKKALERMLKKKPV

SEQ ID NO: 223 - protein, 414 aa, Unknown
  Description of Unknown: Cas14e.1|rifcsphigho2_01_scaffold_566_curated|113069..114313 sequence
MAKRNFGEKSEALYRAVRFEVRPSKEELSILLAVSEVLRMLFNSALAERQQVFTEFIASLYAELKSASVPEEISEIRKKLREAYKEHSISLFDQINALTARRVEDEAFASVTRNWQEETLDALDGAYKSFLSLRRKGDYDAHSPRSRDSGFFQKIPGRSGFKIGEGRIALSCGAGRKLSFPIPDYQQGRLAETTKLKKFELYRDQPNLAKSGRFWISVVYELPKPEATTCQSEQVAFVALGASSIGVVSQRGEEVIALWRSDKHWVPKIEAVEERMKRRVKGSRGWLRLLNSGKRRMHMISSRQHVQDEREIVDYLVRNHGSHFVVTELVVRSKEGKLADSSKPERGGSLGLNWAAQNTGSLSRLVRQLEEKVKEHGGSVRKHKLTLTEAPPARGAENKLWMARKLRESFLKEV

SEQ ID NO: 224 - protein, 413 aa, Unknown
  Description of Unknown: Cas14e.2|rifcsplowo2_01_scaffold_81231_curated|976..2217 sequence
LAKNDEKELLYQSVKFEIYPDESKIRVLTRVSNILVLVWNSALGERRARFELYIAPLYEELKKFPRKSAESNALRQKIREGYKEHIPTFFDQLKKLLTPMRKEDPALLGSVPRAYQEETLNTLNGSFVSFMTLRRNNDMDAKPPKGRAEDRFHEISGRSGFKIDGSEFVLSTKEQKLRFPIPNYQLEKLKEAKQIKKFTLYQSRDRRFWISIAYEIELPDQRPFNPEEVIYIAFGASSIGVISPEGEKVIDFWRPDKHWKPKIKEVENRMRSCKKGSRAWKKRAAARRKMYAMTQRQQKLNHREIVASLLRLGFHFVVTEYTVRSKPGKLADGSNPKRGGAPQGFNWSAQNTGSFGEFILWLKQKVKEQGGTVQTFRLVLGQSERPEKRGRDNKIEMVRLLREKYLESQTIVV

SEQ ID NO: 225 - protein, 449 aa, Unknown
  Description of Unknown: Cas14e.3|rifcsphigho2_01_scaffold_4702_curated|82881..84230| revcom sequence
MAKGKKKEGKPLYRAVRFEIFPTSDQITLFLRVSKNLQQVWNEAWQERQSCYEQFFGSIYERIGQAKKRAQEAGFSEVWENEAKKGLNKKLRQQEISMQLVSEKESLLQELSIAFQEHGVTLYDQINGLTARRIIGEFALIPRNWQEETLDSLDGSFKSFLALRKNGDPDAKPPRQRVSENSFYKIPGRSGFKVSNGQIYLSFGKIGQTLTSVIPEFQLKRLETAIKLKKFELCRDERDMAKPGRFWISVAYEIPKPEKVPVVSKQITYLAIGASRLGVVSPKGEFCLNLPRSDYHWKPQINALQERLEGVVKGSRKWKKRMAACTRMFAKLGHQQKQHGQYEVVKKLLRHGVHFVVTELKVRSKPGALADASKSDRKGSPTGPNWSAQNTGNIARLIQKLTDKASEHGGTVIKRNPPLLSLEERQLPDAQRKIFIAKKLREEFLADQK

SEQ ID NO: 226 - protein, 711 aa, Unknown
  Description of Unknown: Cas14f.1|rifcsp13_1_sub10_scaffold_3_curated|38906..41041 sequence
MAKREKKDDVVLRGTKMRIYPTDRQVTLMDMWRRRCISLWNLLLNLETAAYGAKNTRSKLGWRSIWARVVEENHAKALIVYQHGKCKKDGSFVLKRDGTVKHPPRERFPGDRKILLGLFDALRHTLDKGAKCKCNVNQPYALTRAWLDETGHGARTADIIAWLKDFKGECDCTAISTAAKYCPAPPTAELLTKIKRAAPADDLPVDQAILLDLFGALRGGLKQKECDHTHARTVAYFEKHELAGRAEDILAWLIAHGGTCDCKIVEEAANHCPGPRLFIWEHELAMIMARLKAEPRTEWIGDLPSHAAQTVVKDLVKALQTMLKERAKAAAGDESARKTGFPKFKKQAYAAGSVYFPNTTMFFDVAAGRVQLPNGCGSMRCEIPRQLVAELLERNLKPGLVIGAQLGLLGGRIWRQGDRWYLSCQWERPQPTLLPKTGRTAGVKIAASIVFTTYDNRGQTKEYPMPPADKKLTAVHLVAGKQNSRALEAQKEKEKKLKARKERLRLGKLEKGHDPNALKPLKRPRVRRSKLFYKSAARLAACEAIERDRRDGFLHRVTNEIVHKFDAVSVQKMSVAPMMRRQKQKEKQIESKKNEAKKEDNGAAKKPRNLKPVRKLLRHVAMARGRQFLEYKYNDLRGPGSVLIADRLEPEVQECSRCGTKNPQMKDGRRLLRCIGVLPDGTDCDAVLPRNRNAARNAEKRLRKHREAHNA

SEQ ID NO: 227 - protein, 574 aa, Unknown
  Description of Unknown: Cas14f.2|3300009991.a|Ga0105042_100140|1624..3348 sequence
MNEVLPIPAVGEDAADTIMRGSKMRIYPSVRQAATMDLWRRRCIQLWNLLLELEQAAYSGENRRTQIGWRSIWATVVEDSHAEAVRVAREGKKRKDGTFRKAPSGKEIPPLDPAMLAKIQRQMNGAVDVDPKTGEVTPAQPRLFMWEHELQKIMARLKQAPRTHWIDDLPSHAAQSVVKDLIKALQAMLRERKKRASGIGGRDTGFPKFKKNRYAAGSVYFANTQLRFEAKRGKAGDPDAVRGEFARVKLPNGVGWMECRMPRHINAAHAYAQATLMGGRIWRQGENWYLSCQWKMPKPAPLPRAGRTAAIKIAAAIPITTVDNRGQTREYAMPPIDRERIAAHAAAGRAQSRALEARKRRAKKREAYAKKRHAKKLERGIAAKPPGRARIKLSPGFYAAAAKLAKLEAEDANAREAWLHEITTQIVRNFDVIAVPRMEVAKLMKKPEPPEEKEEQVKAPWQGKRRSLKAARVMMRRTAMALIQTTLKYKAVDLRGPQAYEEIAPLDVTAAACSGCGVLKPEWKMARAKGREIMRCQEPLPGGKTCNTVLTYTRNSARVIGRELAVRLAERQKA

SEQ ID NO: 228 - protein, 743 aa, Unknown
  Description of Unknown: Cas14g.1|RBG_13_scaffold_1401_curated|15949..18180 sequence
MSVRSFQARVECDKQTMEHLWRTHKVFNERLPEIIKILFKMKRGECGQNDKQKSLYKSISQSILEANAQNADYLLNSVSIKGWKPGTAKKYRNASFTWADDAAKLSSQGIHVYDKKQVLGDLPGMMSQMVCRQSVEAISGHIELTKKWEKEHNEWLKEKEKWESEDEHKKYLDLREKFEQFEQSIGGKITKRRGRWHLYLKWLSDNPDFAAWRGNKAVINPLSEKAQIRINKAKPNKKNSVERDEFFKANPEMKALDNLHGYYERNFVRRRKTKKNPDGFDHKPTFTLPHPTIHPRWFVFNKPKTNPEGYRKLILPKKAGDLGSLEMRLLTGEKNKGNYPDDWISVKFKADPRLSLIRPVKGRRVVRKGKEQGQTKETDSYEFFDKHLKKWRPAKLSGVKLIFPDKTPKAAYLYFTCDIPDEPLTETAKKIQWLETGDVTKKGKKRKKKVLPHGLVSCAVDLSMRRGTTGFATLCRYENGKIHILRSRNLWVGYKEGKGCHPYRWTEGPDLGHIAKHKREIRILRSKRGKPVKGEESHIDLQKHIDYMGEDRFKKAARTIVNFALNTENAASKNGFYPRADVLLLENLEGLIPDAEKERGINRALAGWNRRHLVERVIEMAKDAGFKRRVFEIPPYGTSQVCSKCGALGRRYSIIRENNRREIRFGYVEKLFACPNCGYCANADHNASVNLNRRFLIEDSFKSYYDWKRLSEKKQKEEIETIESKLMDKLCAMHKISRGSISK

SEQ ID NO: 229 - protein, 769 aa, Unknown
  Description of Unknown: Cas14g.2|3300009652.a|Ga0123330_1010394|2814..5123 sequence
MHLWRTHCVFNQRLPALLKRLFAMRRGEVGGNEAQRQVYQRVAQFVLARDAKDSVDLLNAVSLRKRSANSAFKKKATISCNGQAREVTGEEVFAEAVALASKGVFAYDKDDMRAGLPDSLFQPLTRDAVACMRSHEELVATWKKEYREWRDRKSEWEAEPEHALYLNLRPKFEEGEAARGGRFRKRAERDHAYLDWLEANPQLAAWRRKAPPAVVPIDEAGKRRIARAKAWKQASVRAEEFWKRNPELHALHKIHVQYLREFVRPRRTRRNKRREGFKQRPTFTMPDPVRHPRWCLFNAPQTSPQGYRLLRLPQSRRTVGSVELRLLTGPSDGAGFPDAWVNVRFKADPRLAQLRPVKVPRTVTRGKNKGAKVEADGFRYYDDQLLIERDAQVSGVKLLFRDIRMAPFADKPIEDRLLSATPYLVFAVEIKDEARTERAKAIRFDETSELTKSGKKRKTLPAGLVSVAVDLDTRGVGFLTRAVIGVPEIQQTHHGVRLLQSRYVAVGQVEARASGEAEWSPGPDLAHIARHKREIRRLRQLRGKPVKGERSHVRLQAHIDRMGEDRFKKAARKIVNEALRGSNPAAGDPYTRADVLLYESLETLLPDAERERGINRALLRWNRAKLIEHLKRMCDDAGIRHFPVSPFGTSQVCSKCGALGRRYSLARENGRAVIRFGWVERLFACPNPECPGRRPDRPDRPFTCNSDHNASVNLHRVFALGDQAVAAFRALAPRDSPARTLAVKRVEDTLRPQLMRVHKLADAGVDSPF

SEQ ID NO: 230 - protein, 564 aa, Unknown
  Description of Unknown: Cas14h.1|3300005602.a|Ga0070762_10001740|7377..9071|revcom sequence
MSRVELHRAYKFRLYPTPAQVAELAEWERQLRRLYNLAHSQRLAAMQRHVRPKSPGVLKSECLSCGAVAVAEIGTDGKAKKTVKHAVGCSVLECRSCGGSPDAEGRTAHTAACSFVDYYRQGREMTQLLEEDDQLARVVCSARQETLRDLEKAWQRWHKMPGFGKPHFKKRIDSCRIYFSTPKSWAVDLGYLSFTGVASSVGRIKIRQDRVWPGDAKFSSCHVVRDVDEWYAVFPLTFTKEIEKPKGGAVGINRGAVHAIADSTGRVVDSPKFYARSLGVIRHRARLLDRKVPFGRAVKPSPTKYHGLPKADIDAAAARVNASPGRLVYEARARGSIAAAEAHLAALVLPAPRQTSQLPSEGRNRERARRFLALAHQRVRRQREWFLHNESAHYAQSYTKIAIEDWSTKEMTSSEPRDAEEMKRVTRARNRSILDVGWYELGRQIAYKSEATGAEFAKVDPGLRETETHVPEAIVRERDVDVSGMLRGEAGISGTCSRCGGLLRASASGHADAECEVCLHVEVGDVNAAVNVLKRAMFPGAAPPSKEKAKVTIGIKGRKKKRAA

SEQ ID NO: 231 - protein, 565 aa, Unknown
  Description of Unknown: Cas14h.2|3300005921.a|Ga0070766_10011912|384..2081 sequence
MSRVELHRAYKFRLYPTPVQVAELSEWERQLRRLYNLGHEQRLLTLTRHLRPKSPGVLKGECLSCDSTQVQEVGADGRPKTTVRHAEQCPTLACRSCGALRDAEGRTAHTVACAFVDYYRQGREMTELLAADDQLARVVCSARQEVLRDLDKAWQRWRKMPGFGKPRFKRRTDSCRIYFSTPKAWKLEGGHLSFTGAATTVGAIKMRQDRNWPASVQFSSCHVVRDVDEWYAVFPLTFVAEVARPKGGAVGINRGAVHAIADSTGRVVDSPRYYARALGVIRHRARLFDRKVPSGHAVKPSPTKYRGLSAIEVDRVARATGFTPGRVVTEALNRGGVAYAECALAAIAVLGHGPERPLTSDGRNREKARKFLALAHQRVRRQREWFLHNESAHYARTYSKIAIEDWSTKEMTASEPQGEETRRVTRSRNRSILDVGWYELGRQLAYKTEATGAEFAQVDPGLKETETNVPKAIADARDVDVSGMLRGEAGISGTCSKCGGLLRAPASGHADAECEICLNVEVGDVNAAVNVLKRAMFPGDAPPASGEKPKVSIGIKGRQKKKKAA

SEQ ID NO: 232 - protein, 499 aa, Unknown
  Description of Unknown: Cas14h.3|3300009698.a|Ga0116216_10000905|8005..9504 sequence
MEAIATGMSPERRVELGILPGSVELKRAYKFRLYPMKVQQAELSEWERQLRRLYNLAHEQRLAALLRYRDWDFQKGACPSCRVAVPGVHTAACDHVDYFRQAREMTQLLEVDAQLSRVICCARQEVLRDLDKAWQRWRKKLGGRPRFKRRTDSCRIYLSTPKHWEIAGRYLRLSGLASSVGEIRIEQDRAFPEGALLSSCSIVRDVDEWYACLPLTFTQPIERAPHRSVGLNRGVVHALADSDGRVVDSPKFFERALATVQKRSRDLARKVSGSRNAHKARIKLAKAHQRVRRQRAAFLHQESAYYSKGFDLVALEDMSVRKMTATAGEAPEMGRGAQRDLNRGILDVGWYELARQIDYKRLAHGGELLRVDPGQTTPLACVTEEQPARGISSACAVCGIPLARPASGNARMRCTACGSSQVGDVNAAENVLTRALSSAPSGPKSPKASIKIKGRQKRLGTPANRAGEASGGDPPVRGPVEGGTLAYVVEPVSESQSDT

SEQ ID NO: 233 - protein, 445 aa, Unknown
  Description of Unknown: Ga0066868_100162752 sequence
MTRNYPYKFRLEPTEEQKTRLKHYGFTCRFIYNLALDQRNLSRDPKPLPTLLEMWEKRVADKLAGVKPERKERNFEEERKQEVVHKNINYGFQSPQMTVLRREVEWMQDVPFSCLQETLRSLQTAFKNFFDRVKKGQRVSDGRNPYGYPVYRSRYRLSIPFKPANVSIKKVSERAGGEEGAYFSELKVPLMGSLIRFRQDRPVLGTPKTPTLKLEGDGKWYVVILTEQEVEDPQTPEAEVGIDLGVAKMITLSDGTIYPLTKKQQQTFTNIDTTEKRIRKLQAACDRRKTKFSKNWIKVKRQVVKLKHRQKRSRESLHHEITHLITSGFGRVAVENLNIKGMTPSASGTEEEPGTNVAQKSGLNREILKRGWGLLVSQLEYKAKWRGGEVIKVDPKYTSQTCSKCGHVEKANRATQATFLCQKCGHKENADVNAAKNILTRAEKQ

SEQ ID NO: 234 - protein, 555 aa, Unknown
  Description of Unknown: PhageCas14_SR-VP_2-4_scaffold_141_2548329_92 sequence
MAKQAPGKRTDESKERKAFSFRLYPTPEQERYLARVVGSCRYIYNALVREHERRMKYMRTFGAWPKPIGFKTSKKKQSLAEDYKLEASLYEIQTALHEPGGPAPWLEDVAGNIRNHAVAMFGAAQTNWMSGRTGPPNFKQRRPAGSFRFQDTRVASITGGPDRQPGFDFIRIPLPHGIEIDSWICFRRHRRLRGQPKTATIRRAAGIWYVSILCEWDKPAKLPVHRAPNAKVGVDLNVRNLCALSDGTIIDGRSADLARLEKSINRLKHRESKLRLREKAASAPRSKRHFRLQCRIARLQDRQANLRNEVTNQVAHAVALKHAFVGLEGLDIKGMTASAKGTVDAPGLNVRAKAGLNRAILNRGWGKLREKIESKVKIYGGQTVRVPPQYTSQTCAKCGHIAAENRDGVIFHCVKCGFTAHADVNAATNILEKALRLSAQESPGSGSLDGERPTELGSTTRQRVRKQKDTKTLGAPKATSRKGATAPRSTIPSLHVDMQVTSARVVPAPQEALATEIAQQMKALAKSEVDAAPRQKINRRRRSQTEVEVPTGSVE

SEQ ID NO: 235 - protein, 555 aa, Unknown
  Description of Unknown: PhageCas14_SR-VP_4-6_scaffold_141_3640689_5 sequence
MAKQAPGKRTDESKERKAFSFRLYPTPEQERYLARVVGSCRYIYNALVREHERRMKYMRTFGAWPKPIGFKTSKKKQSLAEDYKLEASLYEIQTALHEPGGPAPWLEDVAGNIRNHAVALFGAAQTNWMSGRTGPPNFKQRRPAGSFRFQDTRVASITGGPDRQPGFDFIRIPLPHGIEIDSWICFRRHRRLRGQPKTATIRRAAGIWYVSILCEWDKPAKLPVHRAPNAKVGVDLNVRYLCALSDGTIIDGRSADLARLEKSINRLKHRESKLRLREKAASAPRSKRHFRLQCRIARLQDRQANLRNEVTNQVAHAVALKHAFVGLEGLDIKGMTASAKGTVDAPGLNVRAKAGLNRAILNRGWGKLREKIESKVKIYGGQTVRVPPQYTSQTCAKCGHIAAENRDGVIFHCVKCGFTAHADVNAATNILEKALRLSAQESPGSGSLDGERPTELGSTTRQRVRKQKDTKTLGAPKATSRKGATAPRSTIRSLHVDMQVTSARVVPAPQEALATEIAQQMKALAKSEVDAAPRQKINRRRRSQTEVEVPTGSVE

SEQ ID NO: 236 - protein, 439 aa, Unknown
  Description of Unknown: PhageCas14J_k87_9374247_16 sequence
MIESKAFKFRVYPTDKQKELIHNSVRASNFIFNFSLRQQIDISDKMNEMGIIEKGERKKYMKDNDLYFNKYTMSRQLTVMGNTEEFSFLKEIDATSKSYALRRIDNAFKNMVKMGAGFPKFKNINKSTYSFTGQIQYQNDRIKNLRVIKTKNPKIVHLNLSKLKNLKCVCHIPMFIENWSNMDTIKINSYTISRKGNNYYISFQVEHNQPLISEPIKREIKYETTIGIDMGVERPITTSDEADFNLKLFNERFNILKKHRKELHKLSAILNKKRDYHKKNESEIKFYETATYKRILKKMRGLYHKITNIRENLQHNITSNLVNKENIDTFILEELNLKNMTKRSGKGKSNNKSNLNRVLLDVGMHGIKSKLEYKAEKMGKNVETINPRFTSQKCSDCGHINKLNRKSQAVFKCVKCGYTLNADLNAAINIKNNFFGKNT

SEQ ID NO: 237 - protein, 450 aa, Unknown
  Description of Unknown: PhageCas14J_LacPavin_0818_WC40_scaffold_407201_205 sequence
MEDIIEISEKKKKTKISGTGKGFSIRIYPDKKQIEYIRDSFRVNNFIYNYFLSKQEKIVSELKEMGLEGKALKSHMKLNNLYFDYNSSRDLLYEMKKTPEYSFLGNASALSYHYALMRLKNAFDNMWKMNTGFPNYRKRHINKSFSGQILFNTKADKYSPFEIQTINDKWCEITLTKITELKCVVHNNELLDFWNDRSYMHLKSYTITETPSGEFYLAITADIISKPMLEKRIVNEETSIGIDMGVARPITTSDEELFNDKQLSDKFNLIKEYKSEVERLSQILAKKREGNKNWKESKKYERIKKRLAKLHSKIANIRKYLQHNITSKLINSKYDTIIIEDLDVKNMMKKSAKGKSNNKRGLNRVLSDTGLGEIKRQLVYKSNWCGKNIVTVDPKYTSQMCSNCGHTHRDNRKKQDEFICVSCGHNENADLNAAKNIKNKFFKKLAELKN

SEQ ID NO: 238 - protein, 422 aa, Unknown
  Description of Unknown: PhageCas14J_BML_08042016_6_5m_scaffold_18_prodigal-single_54 sequence
MITKAYKFRIYPTKVQEETINNCFRVNDFIYNFFLGLEQETYDVLYMYGLRNGEKKEDKHLNKWRTENKLWFNRFDASRLLTKMAKLEKYKFLKTYPSTSRTYSLKSLESGMKSFMKGGGFPKFKNKKSNKSFTIQTQKDLKIIHKNGKWHSINLPSALDFPIKKLDIKIHNELFLSPNIKTNSCTVSKRGNQYFISFQVELPGELPRKREIKKETSVGVDFGVKKIITISSDEENPYSCETRFLKNSMNELKRLQKALSQKKKGSVKYNNIKEKINKLHIKISNQRKNLQHNISSFLVNLNADTIIMEDLNLKGMTKTPNPIESNGTFLPNGKSRKSGLNASILDVGIGEIKTQVQYKSDFCGKNVVLVNPQYTSQKCNNCGFTHKENRISQSEFECKNCGHKDNADKNASKNIKQKYFDN

SEQ ID NO: 239 - protein, 392 aa, Unknown
  Description of Unknown: Ga0194119_1000113823 sequence
VKQNKAYKYRIYPTEKQIEYFEGAFKAGRYVYNVSLDCEKQIYQLGGKSNLSHFGLNYHIKNYRVKAPFLNEYDVNIYCNEMKALSKAYKNFFKNKGGYPKFKKESDTTQSFTTRPSTKQNSKNLYITYDGYLKIPKVEKLIKIKYHRPIEGKIKTVTISKKHNKYYVSIMVEYTNNFKKVEVKKSVGIDLGVKAFVVTSDNEVIENPKHLTKNQEHLTVLQRKLARAKKGSNNYKKIKKNISKIHENVANTRENFLHNESKKLVDNYDLICMEDLNVKGMTKSSKGTKENPGKNVKQKSGLNRSIIDVGFGKFKTMIGYKTKNSGKYLVEIGRFEPTSKKCNCCGTINKNLELKDRIWKCENCGEILNRDLNAALNIRDLGTKKFFDSLKK

SEQ ID NO: 240 - protein, 377 aa, Unknown
  Description of Unknown: Ga0116197_10005458 sequence
MLKAYKYRIYPTKEQITLIEKHFGSTRFLYNYFLEYRQKAYAKGNQKVGYMVTQAELTKLKKLKEYEWLNECGSQSLQMALRDLDSAYSRFFKKQGGYPKFKSKKHTSQSFTAPQNIKLASNRVYLPKFTKDGIKVKLHREIPQDAVLKQATVSRQNNQYFVSILIDDNNAIPKPIKAKNAVGLDMGLTDLIITSDFTKYPNNKYFVKSQQKLKKLQRRHSKKQKGSNNRQKAKLRVQKLHTKVSNQRKDTLHKISNEITNQYDIICLETLNVRGMQKNRRLAKGIADVAWSEFMRQLAYKAQWKGKTVLKIDQWFPSSQICSNCGASSKKKELHVRKWECPECHAKHDRDINASINIKNYGLGQIDNRNTVGTIGI

SEQ ID NO: 241 - protein, 400 aa, Unknown
  Description of Unknown: Ga0116179_10426881 sequence
MKIINKTYRFRLFPTKEQEVLLNKHFGCCRWVYNHFLNERKEQYQANKKSDNYYKQAATLAKLKNEEDTKWLKEVNSQSLQFALRSLDTAFLNFFRGKAQFPKFKSKKHKNTFTIPQFGKLEDGKIVIPKFKEGIKVKLHREVKGKIGKMSITKTPTGKYYVSIFTEQEVEELPKTNKQVGIDLGLKDFVITSDNKKFKNNRYVKKYEKQLKKAQQHLSRKQKGSKGFEKQKLKVAKIHEKIANCRLDILHKVSTELVKNYDLIAVEDLNVKGMTKNHKLSKHIADASWGKFVTLLQYKCDWYGKKLVKVNRFYPSSKTCSECGWINQELKLSDREWTCNSCGAIHDRDLNASKNILKEGLKIISAGAVDYTDGDLNDASVKKRKSVKSEAQPIAFGVGG

SEQ ID NO: 242 - protein, 386 aa, Unknown
  Description of Unknown: Ga0268285_10062095 sequence
MIKAFKYRIYPTQDQKELLSNIFGQVRFVYNLGLETKISAYTGNKKHLSCFDLNKQITQLKNECPWLKESPSQALQQSIRNLDVAYTNFFRGAGFPKFKNKYTKQSFQLPQGVFLSDDKKQIFIPKLKFTDIDLHKEFKGEVKTVTVSKTTTNKYYISILVDDKKPIPEKRQIKLESTVGIDLGIKDFAITSDGKKFKNHDFFKSAMNELRIQQRSLARKQKGSNHYIKQKMKVSLLHEHIKNQREDYLHKISKYLVYNYDTICIENLGVSNMMKNHKLSRVIGDMGWHKFKSMLEYKCEWYGKNLSVIGRFDPSSKTCSSCGSINKELTLNDREWTCKCGTKHDRDINAAINIRNFGLRNQPSVTQSEWLHCACDVETHQSLADV

SEQ ID NO: 243 - protein, 400 aa, Unknown
  Description of Unknown: PhageCas14_RifSed sequence
MTTQKTYNFCFYDQRFFELSKEAGEVYSRSLEEFWKIYDETGVWLSKFDLQKHMRNKLERKLLHSDSFLGAMQQVHANLASWKQAKKVVPDACPPRKPKFLQAILFKKSQIKYKNGFLRLTLGTEKEFLYLKWDINIPLPIYGSVTYSKTRGWKINLCLETEVEQKNLSENKYLSIDLGVKRVATIFDGENTITLSGKKFMGLMHYRNKLNGKTQSRLSHKKKGSNNYKKIQRAKRKTTDRLLNIQKEMLHKYSSFIVNYAIRNDIGNIIIGDNSSTHDSPNMRGKTNQKISQNPEQKLKNYIKYKFESISGRVDIVPEPYTSRKCPHCKNIKKSSPKGRTYKCKKCGFIFDRDGVGAINIYNENVSFGQIISPGRIRSLTEPIGMKFHNEIYFKSYVAA

SEQ ID NO: 244 - protein, 403 aa, Unknown
  Description of Unknown: PhageCas14_16ft_4_scaffold_2_465_16ft_4_Phage_29_13 sequence
VITKKTYNFSLYDPRFFELAKEAGDVYSRSLEEFWKVYDETGVWLSKFDLQKHMRNKLERKLLHSDSFIGAMQQVHANLASWKQAKKVVKDACPPRKPKFLQAILFKKSQIKYKNGFLKLTLGIGNEYLNLKWNQEIPLPIYGSVTYSKTRGWKINLCLETDVEQKNLDNNKFLSIDLGVKRIATIFDGENTITLSGKKFMGLMHYRNKLNGKTQSRLSHKKKGSNNYKKIQRAKRRTTDKILNIQKDMLHKYSSFVVNYAIKNNIGNIIIGDNSSTHDSPNMRGKTNQKISQNPEQKLKNYIKYKFEGISGQVNIVPEPYTSRKCPCCKNIKKSSPRGRTYKCKKCDFVFDRDGVGAINIYNENVSFGTCLNLDSGRIRFLTEPIGMKFHNEVYFKSYVAVA

SEQ ID NO: 245 - protein, 415 aa, Unknown
  Description of Unknown: Ga0116179_10109322 sequence
LKELYKTYILPVKQQELARKLSRESGRIYSKVVSKVFDIYKRKGFWLNEFDMKKYIRLYAKNIGLHSQTKQGIVEQYYIALDSFFKAYKNHRNPKPPYKRRKYNVVMYKDSAIKLKNGILKLSNGKGNEPLMVKANKLGKKPKYAELVYHHNKRKYFLHITVEMKGVQRVYEKDRAIAVDLGQIHPMVTYDSKRSIIFNGGVLNSFIRFRNKQLSKLQQKMSMCKKYSKRWKKLNGAKKKLLNKSKNKVNDVLQKYTSYLVGYCIEQGIGTIVIGDIKSIRENINYGVKTNQKLHNSWLFRKMTNIIEHKANNVGIKVEYINEAYTSQTCPVCNKKHKPGNRNFTCKCGFKYHRDAVGAINIHKKYTSSLSARLEGDLTPPVGYRYRYNQRCLAGWNTSIFDAGYFSDLPTKKVA

SEQ ID NO: 246 - protein, 405 aa, Unknown
  Description of Unknown: Ga0116179_10465782 sequence
MSRYVVRTYKVAVPKELYPLCAELNKTAARIYNKTMSLVKKIKYKKGFWLSPNNTQKYILRWACSINVHTHSKQAIIQQYFQALDSYFNAVKTKPDLNPPYKRKRFMPFIWKDTAIKLLPDGKLKLSMGSNREPIVIQTTLLADTKIRQAKLVYEEGKYYLHLVIEGKNVARKPQNGKIMAVDLGILRPITCFDGTEVISYHGGILNSLIRYRNKELAKFQQMLSRCKKGSKRYRKLVKAKKKMLRRTRHQIKDILHKITSNFLKMCLQKGIGTIALGDVTNIRERVEGNDSANQKLHQWCFRKMVDMITYKAELLGMDVKLVPEEYTSQTCPMCGSRNHSNNRNYKCQNCGFKYHRDGVGAINIYVRYLGKKSQVVAGLAPVRGVRYKPHLCGHGVRNAPWKAA

SEQ ID NO: 247 - protein, 397 aa, Unknown
  Description of Unknown: Ga0134101_10165752 sequence
MPGYVVRTYKVPVPEELYPLCAELNKTAARIYNKTMSLVKKIKRKKGIWLSSNNAQKYILRWACGINVHTHSKQAMVQQYFQALDSYFNAVKAKPDLRPPYKKKRFMPFIWKDAAIKLLPDGKLRLSMGNNQKPVVIQTTLPADTKIRQAKLVYEDGKYYLHLATEVKNEVQKQQGKKVMAVDLGILRPITCFDGIEVISYHGGILNSLIRYRNKELAKFQQMLSRCKKGSKRYRKLVKAKKKMLRRIRHQIKDILHKITSNFLKMCLQKGIKTIAVGDITNIRERVQGNDNANQKLHQWCFRKMIDMLTYKVHPLGIDVKLVPENYTSQTCPACGSRNHPTDRNYECQNCGFKYHRDGVGAINIYARYLGKKSQVVAGLAPVRGVRYKPHLCGHGV

SEQ ID NO: 248 - protein, 389 aa, Unknown
  Description of Unknown: Ga0066665_100815632 sequence
MYQVRRVNIGKTAQLDELARECGRLYSQTLASFWRTVRHKGIWLKPKHLMRWHTSEKLHAHTADACVQAFFASLKSWRERRKLGDPDAHPPRKRKWYFRIEYKSTAMHHKDSVLTLSNGKGNTPLVLEWPWETPKTVVIHWTGTQYEAIATYKIEAQGQPQGNKVAGIDLGEIHMAVSHDGTETHILNGRLLRSKRQYQNKLKAELSTMIDVKKKGSLRRKKLIRSKQKQLKKLQHQVNDIEHKQSSRLISTLHAKGVQTVVIGDVRDIRQDLDVGSKNNQKLHQWSHGSIRHKLTYKAEWLGMEVALQDEHYTSRTCPMCQHVRKSKVQGRVFRCPTCHWTYHRDGVGAINIRQKYLGSLPVIGDMAPPIGMRFRPHTSVARWEKTYQ

SEQ ID NO: 249 - protein, 392 aa, Unknown
  Description of Unknown: Ga0224523_10070512 sequence
MYNVRKLKIDQTEQLDVLATASGELYSRTLVSFWRTVRKHGLWLKPSSMMRWQNSGELHAHSADAVVQSFYASLKSWRALRKVDPDAKPPKRRKHFFKVQWKNSAIRLKDGCLVLSNGKGNEPLIIPWNWTLPTLVELGWNGTGYELRVIYSTTPTGVPLGVKVAGVDMGEIHLAVTHDGDDCHIYNGRYLRSVKRYQNKKKAEISARLDRMKKGSRRSKYLKHNKARTLKKLDNQINDILHKQTTKLVSTLHEAGVKTVVIGDVRDIRKGLDYGAKANQKIHQWHLGKTRWLVSYKAERLGMEVVLQDEAYTSQTCPACGKRHKPKDRNYRCSCGFQYHRDGIGAYNIRAKYLGELETPHVVGAMMSPTGVRVLQRCSHLARKNPLPLGMG

SEQ ID NO: 250 - protein, 401 aa, Unknown
  Description of Unknown: Ga0247839_10583994 sequence
MNIAHQDAIWEASKESASIYNDAIKLNQDGIPKAQAMKSLSIQSKHTKYLQSQSSQAPYQNFFIDLSSYFASLKRYQKSKRGYKNEPKPPHKIKTLHAITFKKSAIRVQNGYLLLSLRKPNKPIKLKWSLSKPIWVLINFDIRTGWKMNCVMEQEVQQHQLDKTKILAIDLGNKRIAASFDGKRCVTYSGKILKSLTRLQNKCSARSKASTSSLIKNSKKYKRVMRARRKITARINNQKRDILHKTSRAIVNYAIENNIDKIVFGDCSSIHDGTTLGKENTQQVQQGCEQKLRKYVEYKFRNVGGTTELVSERYSSQECPICDHRYEPRGRTYKCSACGYVYDRDGVGSINIYTNVSSGLTLDVVGGLMPPRGWKFHSQLPCTTLRNSYFSMLYCGEPNDL

SEQ ID NO: 251 - protein, 431 aa, Unknown
  Description of Unknown: Cas14u9|PhageCas14|LacPavin_0818_WC55_scaffold_56344_ prodigal-single_16 sequence
VRKIAESKGYFTKAVSVELVGHSKEDTVWLLDILNRGYPLANKMYLLYRWYYEGLFPTEIELNKLETYVYHKAREDSRFTDIPSNIIACTNRTILQKIKYDIKSGAKSGKRSWSQFKKGQPLYFVQHNYLEKTDDGYNYNFIFGHKFKLKFGRHNEGEQLIEKLMDSESQFKLNANAAFKVIKRRLFLLLSYEIPDKIENKPNPDNIMGIDFGMANFATCYLANDRKFKIVRDHKYLKKRLLLQRKIKNLQSELSMHHAGLGRARKTRKIEDYRNKEKNLTKTEISQILSSIVRLAQANNIGTIKIEYLTIDQKTQLEDKYVYRNWAVMMTIDMLREKAKYVGINVVTIDPYHTSQKCSTCGTIGTRDGRIFSCENPSCKSFHKVVNADKNAAINIANSTQFVDDVKDTEYYKQKQEFFKTLREKKETNIT

SEQ ID NO: 252 - protein, 447 aa, Unknown
  Description of Unknown: Cas14u10|Ga0153798_100522201 sequence
MAKKNIDDTKKVTLCEKVKLTQIYSPVVDWKEFHKIFKILQKETILASNKIISICNIFNSFNNKEEQKDWLIKKYQSEKLRNVLYDVARKYCYYSYSRNANAISNDIYYKYFKGPNSYKVKIQKGIGNPPMTFTESIPLYITVQRHKIECTNNVRHYYTIEVPLLSNNCKSGIQITDTEQTQVNNNALRFGINAAGNKRLIEILDNIIYGKYEFCDSKLKRVKSKKRSHRYDYYFLLSYKKPVIEIKSLKPENVLGVDLGMTVPAYCAVNYCDYKKKAVGDSRIIRFNLIQEKINKRIQRNIKYNLRDGHGRKYKLDGYDGASNKIAKRNSTFNFNLASEIIQLAIKWQCGTIHLEDLTKIHEINPQNRFLKNWTYYDLQKKIENKAKEYGIVVKYINPYYTSQICSNCGHFESGQRISQSQFQCKSCGYSANADYNAARNIALYKF

SEQ ID NO: 253 - protein, 595 aa, Unknown
  Description of Unknown: Cas14u_VU_u11|rifcsplowo2_12_scaffold_23_prodigal-single_23 sequence
MSTMVFEYYLRSPEKEQEQIVIQQLRASYEYYNTLIRIEQNRRNQFRAIQSQDPKIAQLELEISSLDTEIDLHLTSIQNTRSTNRKNVLDKKDVDRVKSLKADRKLKRDELKIAKKSFCDNLIFQKACEDINLFAKNESKAARKATPSYWGSYLLIENAIDAAKKSKTDPKRKYWDWTGRLGVQVQGGMSVSELFGNDTRIQIDPVSLDAWYHPIRGKRKYAQRQPKLRFRINSDDKGKPIFVEFPMIMHRPLPQNACIKQANVIVTNRDRKLCYVLQLTVNIPEPVASPCTNGVGIDLGWRLMDSGDIRVAYGYDQKGTKIDLRLPKSITSLFQKAESIRAIRDKEFEDHRKIMIPLIQGVTFPNINTTNIGLSKSFRRFHSLYLGWKANRQDGDQIAFDALETWHRKDRHLEQYEVGCRKRAMNYRREEYRKFAKQMTSTYGYLALENWNISKVALRPEIEDGTREQSEPQHQRVMACVSMLRQILINTAKREGVSIISVPAAYTTLECAACHKINTWDTSKNVCQTCENCDTVWDQDENAARNLLASGTVLKNTAPLPEEANIANTEKKSRWSKRKAEVVIDEKVDRSQIAS

SEQ ID NO: 254 - protein, 475 aa, Unknown
  Description of Unknown: Cas14u_VU_u12|SR-VP_4-6_scaffold_141_2630357_509 sequence
MKVYKYGLLPPIKNQTLVFEQLNKAYQYKKQLIDLVNQEKALLKKEEDNIFQRLNPALISKKETTQQTVEELLALMKQQRSKNRSKQDNIELKQQFKIAKENAKQAKKDYFTELSRIKTLEEVKTSKEKIKTNFKQLHKEARKKCGVYWGTYLLIEEAVEQSKKTSFKKDFIFYGRRDNERLGNQIQTSKDDSGSKIMGMLSSHLFNEKNSQIYIEPVADTAWIGVYRKDRRRTAKTILHWRIASDEKLKPIWAEFPMIMHRPLPKDSKIKSATISRRFYGPHQEWTLEITIDDNLSPTKELGNGVVALDIGWRKLNDKIRVATLYDGEFHKELVISTYQLDKANELKSLRDDLFNQVKNQITEWNKEKFPEWILKELEFVSKWKSQARLVRLVKNWKKERWQDDNIYFELVEAWRYKDQHLWQWECGSRRSGLRERIIIATLPPNLERNITVLYWKTLIFQRWQNYQNFRQKKI

SEQ ID NO: 255 - protein, 411 aa, Unknown
  Description of Unknown: Cas14u_VU_u13|gwd1_scaffold_1554_3 sequence
MPVKAVKFQIIKPLNATWDVLGKTLRDLNYHTTLMCNRAIQLYWEYGNFRSQYKAEHGKYPIDKDIYGCSYRNHVYRQLRLMYPLMASSNTSQTNQFALKRWQTDVPDIRKLAKSIPSFKLGTPIQVANQNFDLRFNDDTFSVDVTLLGRESEVGRFSILLDTGDKSKRVIFQRILDRTYKQGSMQIVYSKKKGKWFCVIAYDSPIKVNELDIDKVMGIDLGIVNAVYWAFNSGHNRGCISGGEIDTFRKQIEVRRRQILRTPRKDGHGRKRNMQAADILGEKISNFRDTVNHKYSKKIIDIAIANKCGVIQMEDLTGISKDSFFLRNWTYRDLQDKIVYKALQEGIIVKLIDPRNTSKTCSVCGHLDAENREDQATFICKNPECGSNMNADHNAAKNISVWSKVSKEFGL

SEQ ID NO: 256 - protein, 425 aa, Unknown
  Description of Unknown: Cas14u_VU_u14|pig_F100_scaffold_13388_4 sequence
MNKVMRYQIIKPIDIDWKTFGDILNKLRQEVRFTKNKTIALYNDWLTYCFQYKNEHNEYPKLVDYCGYKVFSGYAYDKFKTEVVFSNTANYTTSVREACSAYDAHKTDILKGNCSIPSMGANQPIDLHNKSLSVDINEFGDYIATISLLSNRGKKEFGLKSGQIKIVLKAGDKSSRDILQRCVSKEYKICGSKIIYKDKKTFINLCYGFEPVTSELDKSKVMGIDLGVSVPAYMAFNFDKYKRDSIKDNRIMATKWMMDRQLSIAKQSCKYLSDGNCGHGRKKKMVCYDKYSNKSRNLSQTINHGWSKYIVDVAFRNGCGTIQMEDLSGVTSEKDKFLKNWTFYDLQQKIEYKAKERGINVVKINPKYTSQRCCECGCICKRNRPDQKTFKCISCGYSANADFNAAKNIATIGIEDIIANTEVIE

SEQ ID NO: 257 - protein, 459 aa, Unknown
  Description of Unknown: Cas14u_VU_u15|pig_ID_3640_F65_scaffold_73762_2 sequence
MRIEIMVKKKGINMNKIMKYQILKPTNIGWEDFGNILYNLRSEVRKIKNRTIALYHEWTGYTLECHDRTGEWPKPKDVYNYGTIGGYIYDRLKGEVKYSNSVNFSSSVRDAMSKYDTHKKDILAGKASVPSMGDGQPIDIYNKNIVLHHLDNEKKDYAATLSLLNNGAKTELGLLSGRVDVILTIKNETQTAILDRCLSGEYRVCGSQLVYEAAGKEKKGKKDKPKVWLYLCYGFEPEAPELDDSRIMGIDLGMKLPAVMAFNFNDKKYEVIDDNRILDRKIRLDKMLSISKHQCQWRCDGNSGHGRKKKVDVYERYSHKSHNLSMHINHQWSKYIVDTAVKNKCGVIQMEDLSGIKASRQNFLGNWTYYDLQQKITYKAEEKGVKVIKVDPSYTSQMCPVCGYINKRNRSTQADFECLECGHIANADYNAARNIATPDIANIIKNRLAQQKKEGKPIE

SEQ ID NO: 258 - protein, 479 aa, Unknown
  Description of Unknown: Cas14u_VU_u16|pig_ID_1851_F40_2_scaffold_55126_1 sequence
MPMSSYRKTHYTNTCELREIYMRIEIMVKKKGINMNKIMKYQILKPTNISWEDFGNILYNLRSEVRKIKNRTIALYHEWTNYTLECHDKTGEWPKPKDVYNYGTMSGYIYDRLKGEVRYSNSVNFNSSVRDAMSKYDTHKKDILAGKVSVPSMGDGQPIDIYNKNIVLHHLDNEKKDYAATLSLLNNGAKAELGLLSGRVDVILTIKNETQTAILDRCLSGEYRICGSQLIYEGGKEKKGKKDKPKVWLYLCYGFEPEAPELDDSRIMGIDLGMKLPAVMAFNFNDKKYEVIDDNRILDRKIRLDKMLSMSKHQCQWRCDGNSGHGRNKKVDVYERYSHKSHNLSMDINHQWSKYIVDTAVKNKCGVIQMEDLSGIKASRQNFLGNWTYYDLQQKITYKAEEKGIKVIKVDPCYTSQMCPVCGYINKRNRSTQADFECLECGHIANADYNAARNIATPDIANIIKNRLAQQKKEGKPIE

SEQ ID NO: 259 - protein, 447 aa, Unknown
  Description of Unknown: Cas14u_VU_u17|pig_ID_3784_F96_scaffold_13509_10 sequence
MNKIMKYQIIKPLNIDWETFGNILFNLRKESRQVKNRAIAIYHEWVLYSMAYYDECGKWPKIIDVYPPYKTADGYIYDKLKNEMGHMLSNNFNATIRNALSKYDTHKKDIMAGKVSVPSMDAGQPIDVYAKGITLHHIDGDKGDYVATLSLLNSKAKATLNLPSGRIDMVLKMNDKTQTAILDRCLSGEYRICGSQLVYEAAGKEKKGKKDKPKVWLYLCYGFEPEAPELDDSRIMGIDLGMKLPAVMAFNFNDKKYEVIDDNRILDRKIRLDKMLSISKHQCQWRCDGNSGHGRKKKVDVYERYSHKSHNLSMDINHQWSKYIVETAVKNKCGVIQVEDLSGIKASRQNFLGNWTYYDLQQKITYKAEEKGIKVIKVDPSYTSQMCPVCGYINKRNRSTQADFECLECGHIANADYNAARNIATPDIANIIKNRLAQQKKEGKPIE

SEQ ID NO: 260 - protein, 447 aa, Unknown
  Description of Unknown: Cas14u_VU_u18|SRR1747065_scaffold_28 sequence
MNKVMKYQIIKPLNIDWEDFGNILFNLRKESRQIKNRAIAIYHEWVQYSMSYYDEYGKWPKVIDVYPPYKTVDGYIYDRLKNEMGHTSSNNFNATIRNALSKYDTHKKDIMAGKVSVPSMDAGQPIDVYAKGITLHHIDGDKDDYVATLSLLNSKAKATLNLPSGRIDMVLKMNDKTQTAILDRCLSGEYRICGSQLIYEAAGKEKKGKKDKPKVWLYLCYGFEPEAPELDDSRIMGIDLGMKLPAVMAFNFNDKKYEVIDDNRILGQKIRLDKMLSISKHQCQWRCDGNSGHGRKKKVDVYEKCSHRSHNLSMDINHQWSKYIVETAIKNKCGVIQMEDLSGIKASRQNFLGNWTYYDLQQKITYKAEGKGIKVIKIDPHYTSQMCPICGYINKRNRSTQADFECLECGHIANADYNAARNIATPDIANIIKNRVKQQEKEGKSID

SEQ ID NO: 261 - protein, 358 aa, Unknown
  Description of Unknown: Cas14u.1|3300009029.a|Ga0066793_10010091|37..1113|revcom sequence
MSTITRQVRLSPTPEQSRLLMAHCQQYISTVNVLVAAFDSEVLTGKVSTKDFRAALPSAVKNQALRDAQSVFKRSVELGCLPVLKKPHCQWNNQNWRVEGDQLILPICKDGKTQQERFRCAAVALEGKAGILRIKKKRGKWIADLTVTQEDAPESSGSAIMGVDLGIKVPAVAHIGGKGTRFFGNGRSQRSMRRRFYARRKTLQKAKKLRAVRKSKGKEARWMKTINHQLSRQIVNHAHALGVGTIKIEALQGIRKGTTRKSRGAAARKNNRMTNTWSFSQLTLFITYKAQRQGITVEQVDPAYTSQDCPACRARNGAQDRTYVCSECGWRGHRDTVGAINISRRAGLSGHRRGATGA

SEQ ID NO: 262 - protein, 369 aa, Unknown
  Description of Unknown: Cas14u.2|3300002172.a|JGI24730J26740_1002785|496..1605|revcom sequence
MLQTLLVKLDPSKEQYKMLYETMERFNEACNQIAETVFAIHSANKIEVQKTVYYPIREKFGLSAQLTILAIRKVCEAYKRDKSIKPEFRLDGALVYDQRVLSWKGLDKVSLVTLQGRQIIPIKFGDYQKARMDRIRGQADLILVKGVFYLCVVVEVSEESPYDPKGVLGVDLGIKNLAVDSDGEVHSGEQTTNTRERLDSLKARLQSKGTKSAKRHLKKLSGRMAKFSKDVNHCISKKLVAKAKGTLMSIALEDLQGIRDRVTVRKAQRRNLHTWNFGLLRMFVDYKAKIAGVPLVFVDPRNTSRTCPSCGHVAKANRPTRDEFRCVSCGFAGAADHIAAMNIAFRAEVSQPIVTRFFVQSQAPSFRVG

SEQ ID NO: 263 - protein, 486 aa, Unknown
  Description of Unknown: Cas14u.3|19ft_2_nophage_noknown_scaffold_0_curated|508188.. 509648 sequence
LAEENTLHLTLAMSLPLNDLPENRTRSELWRRQWLPQKKLSLLLGVNQSVRKAAADCLRWFEPYQELLWWEPTDPDGKKLLDKEGRPIKRTAGHMRVLRKLEEIAPFRGYQLGSAVKNGLRHKVADLLLSYAKRKLDPQFTDKTSYPSIGDQFPIVWTGAFVCYEQSITGQLYLYLPLFPRGSHQEDITNNYDPDRGPALQVFGEKEIARLSRSTSGLLLPLQFDKWGEATFIRGENNPPTWKATHRRSDKKWLSEVLLREKDFQPKRVELLVRNGRIFVNVACEIPTKPLLEVENFMGVSFGLEHLVTVVVINRDGNVVHQRQEPARRYEKTYFARLERLRRRGGPFSQELETFHYRQVAQIVEEALRFKSVPAVEQVGNIPKGRYNPRLNLRLSYWPFGKLADLTSYKAVKEGLPKPYSVYSATAKMLCSTCGAANKEGDQPISLKGPTVYCGNCGTRHNTGFNTALNLARRAQELFVKGVVAR

SEQ ID NO: 264 - protein, 400 aa, Unknown; identical to SEQ ID NO: 243
  Description of Unknown: Cas14u.4|rifcsp2_19_4_full_scaffold_168_curated|84455..85657 sequence

SEQ ID NO: 265 - protein, 666 aa, Unknown
  Description of Unknown: Cas14u.5|3300012532.a|Ga0137373_10000316|3286..5286 sequence
MATLVYRYGVRAHGSARQQDAVVSDPAMLEQLRLGHELRNALVGVQHRYEDGKRAVWSGFASVAAADHRVTTGETAVAELEKQARAEHSADRTAATRQGTAESLKAARAAVKQARADRKAAMAAVAEQAKPKIQALGDDRDAEIKDLYRRFCQDGVLLPRCGRCAGDLRSDGDCTDCGAAHEPRKLYWATYNAIREDHQTAVKLVEAKRKAGQPARLRFRRWTGDGTLTVQLQRMHGPACRCVTCAEKLTRRARKTDPQAPAVAADPAYPPTDPPRDPALLASGQGKWRNVLQLGTWIPPGEWSAMSRAERRRVGRSHIGWQLGGGRQLTLPVQLHRQMPADADVAMAQLTRVRVGGRHRMSVALTAKLPDPPQVQGLPPVALHLGWRQRPDGSLRVATWACPQPLDLPPAVADVVVSHGGRWGEVIMPARWLADAEVPPRLLGRRDKAMEPVLEALADWLEAHTEACTARMTPALVRRWRSQGRLAGLTNRWRGQPPTGSAEILTYLEAWRIQDKLLWERESHLRRRLAARRDDAWRRVASWLARHAGVLVVDDADIAELRRRDDPADTDPTMPASAAQAARARAALAAPGRLRHLATITATRDGLGVHTVASAGLTRLHRKCGHQAQPDPRYAASAVVTCPGCGNGYDQDYNAAMLMLDRQQQP

SEQ ID NO: 266 - protein, 560 aa, Unknown
  Description of Unknown: Cas14u.6|3300006028.a|Ga0070717_10000077|54519..56201|revcom sequence
MTVRTYKYRAYPTPEQAEALTSWLRFASQLYNAALEHRKNAWGRHDAHGRGFRFWDGDAAPRKKSDPPGRWVYRGGGGAHISKNDQGKLLTEFRREHAELLPPGMPALVQHEVLARLERSMAAFFQRATKGQKAGYPRWRSEHRYDSLTFGLTSPSKERFDPETGESLGRGKTVGAGTYHNGDLRLTGLGELRILEHRRIPMGAIPKSVIVRRSGKRWFVSIAMEMPSVEPAASGRPAVGLDMGVVTWGTAFTADTSAAAALVADLRRMATDPSDCRRLEELEREAAQLSEVLAHCRARGLDPARPRRCPKELTKLYRRSLHRLGELDRACARIRRRLQAAHDIAEPVPDEAGSAVLIEGSNAGMRHARRVARTQRRVARRTRAGHAHSNRRKKAVQAYARAKERERSARGDHRHKVSRALVRQFEEISVEALDIKQLTVAPEHNPDPQPDLPAHVQRRRNRGELDAAWGAFFAALDYKAADAGGRVARKPAPHTTQECARCGTLVPKPISLRVHRCPACGYTAPRTVNSARNVLQRPLEEPGRAGPSGANGRGVPHAVA

SEQ ID NO: 267 - protein, 404 aa, Unknown
  Description of Unknown: Cas14u.7|3300001256.a|JGI12210J13797_10004690|5792..7006 sequence
MNCRYRYRIYPTPGQRQSLARLFGCVRVVWNDALFLCRQSEKLPKNSELQKLCITQAKKTEARGWLGQVSAIPLQQSVADLGVAFKNFFQSRSGKRKGKKVNPPRVKRRNNRQGARFTRGGFKVKTSKVYLARIGDIKIKWSRPLPSEPSSVTVIKDCAGQYFLSFVVEVKPEIKPPKNPSIGIDLGLKTFASCSNGEKIDSPDYSRLYRKLKRCQRRLAKRQRGSKRRERMRVKVAKLNAQIRDKRKDFLHKLSTKVVNENQVIALEDLNVGGMLKNRKLSRAISQAGWYEFRSLCEGKAEKHNRDFRVISRWEPTSQVCSECGYRWGKIDLSVRSIVCINCGVEHDRDDNASVNIEQAGLKVGVGHTHDSKRTGSACKTSNGAVCVEPSTHREYVQLTLFDW

SEQ ID NO: 268 - protein, 392 aa, Unknown
  Description of Unknown: Cas14u.8|3300005660.a|Ga0073904_10021651|765..1943 sequence
MKSRWTFRCYPTPEQEQHLARTFGCVRFVWNWALRARTDAFRAGERIGYPATDKALTLLKQQPETVWLNEVSSVCLQQALRDLQVAFSNFFDKRAAHPSFKRKEARQSANYTERGFSFDHERRILKLAKIGAIKVKWSRKAIPHPSSIRLIRTASGKYFVSLVVETQPAPMPETGESVGVDFGVARLATLSNGERISNPKHGAKWQRRLAFYQKRLARATKGSKRRMRIKRHVARIHEKIGNSRSDTLHKLSTDLVTRFDLICVEDLNLRGMVKNHSLARSLHDASIGSAIRMIEEKAERYGKNVVKIDRWFPSSKTCSDCGHIVEQLPLNVREWTCPECGTTHDRDANAAANILAVGQTVSAHGGTVRRSRAKASERKSQRSANRQGVNRA

SEQ ID NO: 269 - protein, 1437 aa, Unknown; identical to SEQ ID NO: 119
  Description of Unknown: Lachnospiraceae bacterium NK4A179 sequence

SEQ ID NO: 270 - RNA, 11 nt, Artificial Sequence
  Description of Artificial Sequence: Synthetic oligonucleotide
aaaaaauuuuu

SEQ ID NO: 271 - RNA, 12 nt, Artificial Sequence
  Description of Artificial Sequence: Synthetic oligonucleotide
aaaaaauuuuuu

SEQ ID NO: 272 - RNA, 52 nt, Artificial Sequence
  Description of Artificial Sequence: Synthetic oligonucleotide
uagaccaccccaaaaaugaaggggacuaaaacgacgagagaccaacacaaaa

SEQ ID NO: 273 - RNA, 25 nt, Artificial Sequence
  Description of Artificial Sequence: Synthetic oligonucleotide
uuuuguguuguuuuugucucucguc

SEQ ID NO: 274 - RNA, 25 nt, Artificial Sequence
  Description of Artificial Sequence: Synthetic oligonucleotide
guuuuaguccuuuuuccuucauuuu

SEQ ID NO: 275 - RNA, 25 nt, Artificial Sequence
  Description of Artificial Sequence: Synthetic oligonucleotide
uucauuuuuguuuuuggguggucua

SEQ ID NO: 276 - RNA, 37 nt, Artificial Sequence; identical to SEQ ID NO: 31
  Description of Artificial Sequence: Synthetic oligonucleotide

SEQ ID NO: 277 - RNA, 32 nt, Artificial Sequence
  Description of Artificial Sequence: Synthetic oligonucleotide
uuuuguguuguuuuugucucucgucguuuuag

1. A nucleic acid detection system comprising:
i) a reporter molecule comprising a detectable label, wherein the detectable label is released for detection upon cleavage of the reporter molecule;
ii) a primary activator complex comprising a first recognizing complex, and;
iii) an inactive secondary complex wherein;
a) the first recognizing complex recognizes one or more primary activators in a sample, wherein;
b) upon recognition of the primary activator, the primary activator complex is activated and is able to act on the reporter molecule to release the detectable label, and;
c) the activated primary activator complex is able to act on a component of an inactive second recognizing complex to activate the second recognizing complex to become an activated signal amplifier, wherein;
d) said activated signal amplifier is able to act on the reporter molecule to release the detectable label, and;
e) said activated signal amplifier is able to act on a component of an inactive second recognizing complex to activate the second recognizing complex to become an activated signal amplifier such that a feed-forward loop is initiated.

2. A nucleic acid detection system comprising:
a reporter molecule comprising a detectable label, wherein the detectable label is released for detection upon cleavage of the reporter molecule;
a primary activator complex comprising a first Cas-effector enzyme programmed with a first guide RNA, wherein the first guide RNA recognizes one or more primary activators in a sample, wherein upon hybridization of the first guide RNA to the primary activator, the primary activator complex is activated and is a non-specific nuclease that cleaves the reporter molecule and releases the detectable label; and
a signal amplifier comprising a second Cas-effector enzyme and a second guide RNA, wherein activation of the primary activation complex results in the activation of one or more activator sequences that are recognized by the second guide RNA, wherein upon hybridization of the second guide RNA to the activator sequence the signal amplifier complex is activated and is a non-specific nuclease that cleaves the reporter molecule and releases the detectable label.

3. The nucleic acid detection system of claim 1, wherein the first and/or second Cas-effector enzymes comprise a non-specific RNase and/or a DNase when activated.

4. The nucleic acid detection system of claim 1, wherein the first and/or second Cas-effector enzymes comprises one or more Cas13 proteins, one or more Cas12 proteins, one or more Cas14 proteins, one or more Csm6 proteins, and/or one or more Csx1 proteins, optionally one or more proteins as shown in any one of SEQ ID NOs: 115 through 268.

5. The nucleic acid detection system of claim 1, wherein the first and/or second Cas-effectors comprise one or more Cas13 proteins, optionally one or more Cas13 proteins as shown in any one of SEQ ID NOs: 115 to 135.

6. The nucleic acid detection system of claim 1, wherein the first and/or second Cas-effectors comprise one or more Cas13d proteins.

7. The nucleic acid detection system of claim 1, wherein the first and/or second Cas-effectors comprise one or more Cas12 proteins, one or more Cas13 proteins, one or more Cas14 proteins, and/or one or more Csm6 proteins in any combination.

8. The nucleic acid detection system of claim 1, wherein the first and second Cas-effector enzymes comprise one or more of the same or different proteins.

9-10. (canceled)

11. The nucleic acid detection system of claim 1, wherein the reporter molecule comprises a quencher operably linked to the detectable label, optionally wherein the detectable label comprises one or more fluorescent molecule.

12. The nucleic acid detection system of claim 1, wherein the reporter molecule comprises an oligonucleotide linking the quencher and the fluorophore, and the oligonucleotide comprises a caged structure, optionally having or causing a stem-loop structure.

13. The nucleic acid detection system of claim 1, wherein the reporter molecule is complexed with a trans cage molecule, optionally having or causing a stem loop structure.

14. The nucleic acid detection system of claim 1, wherein the reporter molecule the detectable label comprises one or more fluorescent dyes.

15. The nucleic acid detection system of claim 1, wherein the activator complex is caged, optionally having or causing a stem-loop structure.

16. The nucleic acid detection system of claim 1, wherein the activator complex further comprises an oligonucleotide sequence wherein the oligonucleotide sequence comprises modified nucleotide bases.

17. The nucleic acid detection system of claim 1, wherein the activator complex further comprises an oligonucleotide sequence wherein the oligonucleotide sequence comprises both RNA and DNA bases.

18. The nucleic acid detection system of claim 1, wherein the guide RNA is caged, optionally comprising or causing a stem-loop structure.

19. The nucleic acid detection system of claim 1, wherein one or more of the amplifier sequences and/or one or both of the guide RNAs are caged, optionally wherein the cage comprises or causes one or more structures such as a loop structure and/or a modification to one or more of the amplifier sequences comprising one or more locked nucleic acid (LNA) or moieties and/or 2′-OMe RNA.

20. The nucleic acid detection system of claim 1, wherein one or more of the amplifier sequences comprising caging structures on their 3′ and/or 5′ ends.

21. The nucleic acid detection system of claim 1, further comprising trans caging molecules.

22. The nucleic acid detection system of claim 1, wherein the one or both of the first and second guide RNAs and/or one or more of the amplifier sequences are modified to allow conditional interaction with the Cas-effector enzyme during the optimal time frame.

23. The nucleic acid detection system of claim 1, wherein the one or more amplifier sequences comprise poly U and/or poly A sequences, optionally A₄-Uₙ, A₅-Uₙ and A₆-Uₙ sequences.

24. The nucleic acid detection system of claim 1, wherein the target sequence and/or amplifier sequence is(are) 100% complementary to first and/or second guide RNAs.

25. The nucleic acid detection system of claim 1, wherein the target sequence and/or amplifier sequence is(are) not 100% complementary to first and/or second guide RNAs.

26. The nucleic acid detection system of claim 1, wherein the target sequence is DNA or RNA from one or more mammals, viruses, bacteria, or fungi.

27. The nucleic acid detection system of claim 1, wherein the target sequence is in an RNA virus.

28. The nucleic acid detection system of claim 1, wherein the target sequence is in a coronavirus, optionally a SARS-Cov-2 coronavirus.

29. The nucleic acid detection system of claim 1, wherein the sample is a biological or environmental sample.

30. The nucleic acid detection system of claim 1, wherein the biological sample comprises blood, saliva, urine, biopsy, plasma, serum, bronchoalveolar lavage, sputum, a fecal sample, cerebrospinal fluid, a fine needle aspirate, a buccal swab, a cervical swab, a nasal swab, interstitial fluid, synovial fluid, nasal discharge, tears, buffy coat, a mucous membrane sample, or an epithelial cell sample collected from the individual.

31. The nucleic acid detection system of claim 1, wherein the sample comprises a cell-free liquid sample.

32. The nucleic acid detection system of claim 1, wherein the sample comprises a cell-free liquid environmental sample.

33. The nucleic acid detection system of claim 1, wherein the sample comprises a liquid comprising cells.

34. A method of detecting a target sequence in a sample, the method comprising
(a) contacting a sample suspected of including the target sequence with:
(i) a nucleic acid detection system of any of the preceding claims, and (b) measuring a detectable signal from the detectable label, thereby detecting the target sequence.

35-37. (canceled)
